(19) United States
(12) Patent Application Publication
(10) Pub. No.: US 2012/0322676 A1
(43) Pub. Date: Dec. 20, 2012

(54) COMPOSITIONS AND METHODS FOR DETECTION OF CRONOBACTER SPP. AND CRONOBACTER SPECIES AND STRAINS

(75) Inventors: Yongmei JI, Chicago, IL (US); Sheung-Mei ("Rita") Shih, Foster City, CA (US); Lovorka Degoricija, Los Gatos, CA (US); Zhaohui Zhou, San Ramon, CA (US); Craig Cummings, Pacifica, CA (US); Manohar Furtado, San Ramon, CA (US); Pius Brzoska, Woodside, CA (US); Angela Burrell, Austin, TX (US); Harrison Leong, San Francisco, CA (US); Xingwang Fang, Austin, TX (US); Mangkey Bounpheng, Austin, TX (US); Rohan Shah, Austin, TX (US)

(73) Assignee: Life Technologies Corporation, Carlsbad, CA (US)

(21) Appl. No.: 13/495,748

(22) Filed: Jun. 13, 2012

Related U.S. Application Data
(60) Provisional application No. 61/498,443, filed on Jun. 17, 2011.
(60) Provisional application No. 61/550,779, filed on Oct. 24, 2011.

(51) Int. Cl. C12Q 1/68; C40B 30/04; G01N 21/76; C07H 21/04; G01N 27/62

(52) U.S. Cl. 506/9; 435/6.12; 435/6.11; 536/23.1; 536/24.33; 536/24.32

(57) ABSTRACT

Disclosed are genomic sequences for nine strains of Cronobacter spp. (C. sakazakii—696, 701, 680; C. malonaticus—507, 681; C. turicensis—564; C. muytjensii—530; C. dublinensis—582; C. genomosp1—581) and compositions, methods, and kits for detecting, identifying and distinguishing Cronobacter spp. strains from each other and from non-Cronobacter spp. strains. Some embodiments describe isolated nucleic acid compositions unique to certain Cronobacter strains as well as compositions that are specific to all Cronobacter spp. Primer and probe compositions and methods of use of primers and probes are also provided. Kits for identification of Cronobacter spp. are also described. Some embodiments relate to computer software methods for setting a control based threshold for analysis of PCR data.

### REFERENCE TO RELATED APPLICATION

[0001] This application claims the benefit of priority of U.S. Provisional Patent Application Ser. No. 61/550,779, filed Oct. 24, 2011, and of U.S. Provisional Patent Application Ser. No. 61/498,443, filed Jun. 17, 2011, the entire contents of which applications are incorporated herein by reference in their entirety.

### EFS INCORPORATION PARAGRAPH

### Sequence Listing

[0002] The instant application contains a Sequence Listing which has been submitted in ASCII format via EFS-Web and is hereby incorporated by reference in its entirety. Said ASCII copy, created on Jun. 6, 2012, is named LT00536U.txt and is 612,204 bytes in size.

### FIELD OF THE DISCLOSURE

[0003] The present teachings relate to compositions, methods and kits for detection and identification of Cronobacter spp. and Cronobacter species and strains. More particularly, the specification describes compositions and kits comprising nucleic acid sequences specific and/or unique to Cronobacter spp. and also specific to Cronobacter species or strains, and methods of use thereof. Methods for differentially detecting Cronobacter spp. from closely related bacterial species, and the Cronobacter species from each other as well as from other bacterial species are also described.

[0004] In some embodiments, present teachings relate to computer program products including a tangible computer-readable storage medium whose contents include a program with instructions being executed on a processor so as to perform a method for PCR analysis.

### BACKGROUND

[0005] Cronobacter spp. (formerly Enterobacter sakazakii) is a bacterium within the family Enterobacteriaceae. Cronobacter are gram-negative opportunistic food-borne pathogens and are known as rare but important causes of life-threatening neonatal infections which can lead to severe diseases, such as brain abscesses, meningitis, necrotizing enterocolitis and systemic sepsis. Death has been reported in up to 40-80 percent of neonatal patients, occurring within a few hours to several days. Surviving infants may experience neurological impairment and central nervous system infection. Recently, the emergence of antibiotic-resistant strains has been observed. Effectively detecting Cronobacter in food such as contaminated powdered infant formula is extremely important from the public health and economic perspective.

[0006] The Cronobacter genus is composed of six named species, including C. sakazakii (strains—BAA-894, 680, 696, 701), C. malonaticus (strains—507, 681), C. turicensis (strains—z3032, 564), C. dublinensis (strain—582), C. muytjensii (strain—530) and C. genomosp 1 (strain—581). The C. sakazakii ST4 (sequence type as defined by Multi Locus Sequence Typing) strains (701 is an ST4 strain) are recently found to be strongly associated with neonatal meningitis (Joseph and Forsythe, 2011). So far only two complete genomes, for C. sakazakii—BAA 894 (Kucerova et al., 2010) and C. turicensis—z3032 (Stephan et al., 2011), are publicly available. Genome sequences of more species and strains are desired to study pathogenicity and evolution of the genus, as well as design molecular assays for specific detection of a species or the genus.

[0007] Design and development of molecular detection assays that differentiate or identify a target sequence that is present in organisms to be detected, and absent or divergent in organisms not to be detected is an unmet need for the definitive detection of the pathogenic Cronobacter Spp.

### SUMMARY OF THE DISCLOSURE

[0008] The present disclosure, in some embodiments, discloses the genomic sequences of nine Cronobacter strains (696, 701, 680, 507, 681, 564, 582, 530 and 581). In some embodiments, the disclosure describes isolated nucleic acid sequence compositions comprising portions of the nine Cronobacter strain genomes. In some embodiments, isolated nucleic acid sequence compositions of the disclosure comprise nucleic acid sequences unique to and/or specific to Cronobacter spp. organisms. In some embodiments, eleven strains of Cronobacter were analyzed to find sequences that are unique of specific to Cronobacter spp. organisms.

[0009] In some embodiments, isolated nucleic acid sequence compositions of the disclosure comprise nucleic acid sequences unique to and/or specific to each of the six Cronobacter species and the C. sakazakii ST4 strain. In some embodiments, isolated nucleic acid sequence compositions of the disclosure comprise nucleic acid sequences longer than 100 nucleotides unique to and/or specific to each of the six Cronobacter species and the C. sakazakii ST4 strain. In some embodiments, isolated nucleic acid sequences of the disclosure may have at least 90% sequence identity, at least 80% sequence identity, and/or at least 70% sequence identity to nucleic acid sequences comprising unique and/or specific portions of eleven strains of Cronobacter spp. organisms. In some embodiments, isolated nucleic acid sequences of the disclosure may have at least 90% sequence identity, at least 80% sequence identity, and/or at least 70% sequence identity to nucleic acid sequences comprising unique and/or specific portions of each of the six species and the C. sakazakii ST4 strain of Cronobacter spp.

[0010] In some embodiments, unique Cronobacter spp. nucleic acid sequences may comprise isolated nucleic acid molecules comprising a nucleotide sequence of —SEQ ID NO:1, SEQ ID NO:2, SEQ ID NO:3, SEQ ID NO:4, SEQ ID NO:5, SEQ ID NO:6, SEQ ID NO:7, SEQ ID NO:8, SEQ ID NO:9, SEQ ID NO:10, SEQ ID NO:11, SEQ ID NO:12, fragments thereof, and/or complements thereof. In some embodiments, unique Cronobacter spp. sequences may comprise isolated nucleic acid molecules comprising a nucleotide sequence having at least a 90% sequence identity, at least 80% sequence identity and/or at least 70% sequence identity to the nucleotide sequences of SEQ ID NO:1, SEQ ID NO:2, SEQ ID NO:3, SEQ ID NO:4, SEQ ID NO:5, SEQ ID NO:6, SEQ ID NO:7, SEQ ID NO:8, SEQ ID NO:9, SEQ ID NO:10, SEQ ID NO:11, SEQ ID NO:12, fragments thereof and/or complements thereof.

[0011] In some embodiments, Cronobacter spp. isolated nucleic acid sequences may comprise nucleic acid molecules comprising at least 40 nucleotide sequence of SEQ ID NO:1, SEQ ID NO:2, SEQ ID NO:3, SEQ ID NO:4, SEQ ID NO:5, SEQ ID NO:6, SEQ ID NO:7, SEQ ID NO:8, SEQ ID NO:9, SEQ ID NO:10, SEQ ID NO:11, SEQ ID NO:12; at least 30 nucleotide sequence of SEQ ID NO:1, SEQ ID NO:2, SEQ ID NO:3, SEQ ID NO:4, SEQ ID NO:5, SEQ ID NO:6, SEQ ID NO:7, SEQ ID NO:8, SEQ ID NO:9, SEQ ID NO:10, SEQ ID NO:11, SEQ ID NO:12; at least 25 nucleotide sequence of SEQ ID NO:1, SEQ ID NO:2, SEQ ID NO:3, SEQ ID NO:4, SEQ ID NO:5, SEQ ID NO:6, SEQ ID NO:7, SEQ ID NO:8, SEQ ID NO:9, SEQ ID NO:10, SEQ ID NO:11, SEQ ID NO:12; at least 20 nucleotide sequence of SEQ ID NO:1, SEQ ID NO:2, SEQ ID NO:3, SEQ ID NO:4, SEQ ID NO:5, SEQ ID NO:6, SEQ ID NO:7, SEQ ID NO:8, SEQ ID NO:9, SEQ ID NO:10, SEQ ID NO:11, SEQ ID NO:12; at least 15 nucleotide sequence of SEQ ID NO:1, SEQ ID NO:2, SEQ ID NO:3, SEQ ID NO:4, SEQ ID NO:5, SEQ ID NO:6, SEQ ID NO:7, SEQ ID NO:8, SEQ ID NO:9, SEQ ID NO:10, SEQ ID NO:11, SEQ ID NO:12; at least 10 nucleotide sequence of SEQ ID NO:1, SEQ ID NO:2, SEQ ID NO:3, SEQ ID NO:4, SEQ ID NO:5, SEQ ID NO:6, SEQ ID NO:7, SEQ ID NO:8, SEQ ID NO:9, SEQ ID NO:10, SEQ ID NO:11, SEQ ID NO:12; any intermediate number of contiguous sequences from at least about 10 nucleotides of sequence to at least about 40 nucleotides of sequence of SEQ ID NO:1, SEQ ID NO:2, SEQ ID NO:3, SEQ ID NO:4, SEQ ID NO:5, SEQ ID NO:6, SEQ ID NO:7, SEQ ID NO:8, SEQ ID NO:9, SEQ ID NO:10, SEQ ID NO:11, SEQ ID NO:12, and sequences having 90% identity to the foregoing sequences.

[0012] In some embodiments, unique C. sakazakii nucleic acid sequences may comprise isolated nucleic acid molecules comprising a nucleotide sequence selected from SEQ ID NOs:16-117, fragments thereof, and/or complements thereof. In some embodiments, unique C. sakazakii sequences may comprise isolated nucleic acid molecules comprising a nucleotide sequence having at least a 90% sequence identity, at least 80% sequence identity and/or at least 70% sequence identity to the nucleotide sequences of SEQ ID NOs:16-117, fragments thereof and/or complements thereof.

[0013] In some embodiments, C. sakazakii isolated nucleic acid sequences may comprise nucleic acid molecules comprising at least a 40 nucleotide contiguous sequence of a sequence having SEQ ID NOs: 16-117; at least a 30 nucleotide contiguous sequence of a sequence having SEQ ID NOs: 16-117; at least a 25 nucleotide contiguous sequence of a sequence having SEQ ID NOs: 16-117; at least a 20 nucleotide contiguous sequence of a sequence having SEQ ID NOs: 16-117; at least a 15 nucleotide contiguous sequence of a sequence having SEQ ID NOs: 16-117; at least a 10 nucleotide contiguous sequence of a sequence having SEQ ID NOs: 16-117; any intermediate number of contiguous sequences from at least about 10 nucleotides of sequence to at least about 40 nucleotides of sequence of a sequence having SEQ ID NOs: 16-117, and sequences having 90% identity to the foregoing sequences.

[0014] In some embodiments, unique C. turicensis nucleic acid sequences may comprise isolated nucleic acid molecules comprising a nucleotide sequence having SEQ ID NOs: 118-204, fragments thereof, and/or complements thereof. In some embodiments, unique C. turicensis sequences may comprise isolated nucleic acid molecules comprising a nucleotide sequence having at least a 90% sequence identity, at least 80% sequence identity and/or at least 70% sequence identity to the nucleotide sequences of SEQ ID NOs: 118-204, fragments thereof and/or complements thereof.

[0015] In some embodiments, C. turicensis isolated nucleic acid sequences may comprise nucleic acid molecules comprising at least a 40 nucleotide contiguous sequence of a sequence having SEQ ID NOs: 118-204; at least a 30 nucleotide contiguous sequence of a sequence having SEQ ID NOs: 118-204; at least a 25 nucleotide contiguous sequence of a sequence having SEQ ID NOs: 118-204; at least a 20 nucleotide contiguous sequence of a sequence having SEQ ID NOs: 118-204; at least a 15 nucleotide contiguous sequence of a sequence having SEQ ID NOs: 118-204; at least a 10 nucleotide contiguous sequence of a sequence having SEQ ID NOs: 118-204; any intermediate number of contiguous sequences from at least about 10 nucleotides of sequence to at least about 40 nucleotides of sequence having SEQ ID NOs: 118-204, and sequences having 90% identity to the foregoing sequences.

[0016] In some embodiments, unique C. malonaticus nucleic acid sequences may comprise isolated nucleic acid molecules comprising a nucleotide sequence selected from SEQ ID NOs:205-273, fragments thereof, and/or complements thereof. In some embodiments, unique C. malonaticus sequences may comprise isolated nucleic acid molecules comprising a nucleotide sequence having at least a 90% sequence identity, at least 80% sequence identity and/or at least 70% sequence identity to the nucleotide sequences of SEQ ID NOs:205-273, fragments thereof and/or complements thereof.

[0017] In some embodiments, C. malonaticus isolated nucleic acid sequences may comprise nucleic acid molecules comprising at least a 40 nucleotide contiguous sequence of a sequence having SEQ ID NOs:205-273; at least a 30 nucleotide contiguous sequence of a sequence having SEQ ID NOs:205-273; at least a 25 nucleotide contiguous sequence of a sequence having SEQ ID NOs:205-273; at least a 20 nucleotide contiguous sequence of a sequence having SEQ ID NOs:205-273; at least a 15 nucleotide contiguous sequence of a sequence having SEQ ID NOs:205-273; at least a 10 nucleotide contiguous sequence of a sequence having SEQ ID NOs:205-273; any intermediate number of contiguous sequences having at least about 10 nucleotides to at least about 40 nucleotides of sequence of a sequence having SEQ ID NOs:205-273, and sequences having 90% identity to the foregoing sequences.

[0018] In some embodiments, unique C. muytjensii nucleic acid sequences may comprise isolated nucleic acid molecules comprising a nucleotide sequence selected from SEQ ID NOs:274-685, fragments thereof, and/or complements thereof. In some embodiments, unique C. muytjensii sequences may comprise isolated nucleic acid molecules comprising a nucleotide sequence having at least a 90% sequence identity, at least 80% sequence identity and/or at least 70% sequence identity to the nucleotide sequences of SEQ ID NOs:274-685, fragments thereof and/or complements thereof.

[0019] In some embodiments, C. muytjensii isolated nucleic acid sequences may comprise nucleic acid molecules comprising at least a 40 nucleotide contiguous sequence of a sequence having SEQ ID NOs:274-685; at least a 30 nucleotide contiguous sequence of a sequence having SEQ ID NOs:274-685; at least a 25 nucleotide contiguous sequence of a sequence having SEQ ID NOs:274-685; at least a 20 nucleotide contiguous sequence of a sequence having SEQ ID NOs:274-685; at least a 15 nucleotide contiguous sequence of a sequence having SEQ ID NOs:274-685, at least a 10 nucleotide contiguous sequence of a sequence having SEQ ID NOs:274-685; any intermediate number of contiguous sequences from at least about 10 nucleotides of sequence to at least about 40 nucleotides of sequence of a sequence having SEQ ID NOs:274-685, and sequences having 90% identity to the foregoing sequences.

[0020] In some embodiments, unique C. genomosp1 nucleic acid sequences may comprise isolated nucleic acid molecules comprising a nucleotide sequence having SEQ ID NOs:686-820, and/or complements thereof. In some embodiments, unique C. genomosp1 sequences may comprise isolated nucleic acid molecules comprising a nucleotide sequence having at least a 90% sequence identity, at least 80% sequence identity and/or at least 70% sequence identity to the nucleotide sequences of SEQ ID NOs:686-820, fragments thereof and/or complements thereof.

[0021] In some embodiments, C. genomosp1 isolated nucleic acid sequences may comprise nucleic acid molecules comprising at least a 40 nucleotide contiguous sequence of a sequence having SEQ ID NOs:686-820; at least a 30 nucleotide contiguous sequence of a sequence having SEQ ID NOs:686-820; at least a 25 nucleotide contiguous sequence of a sequence having SEQ ID NOs:686-820; at least a 20 nucleotide contiguous sequence of a sequence having SEQ ID NOs:686-820; at least a 15 nucleotide contiguous sequence of a sequence having SEQ ID NOs:686-820; at least a 10 nucleotide contiguous sequence of a sequence having SEQ ID NOs:686-820; or any intermediate number of contiguous sequences from at least about 10 nucleotides to at least about 40 nucleotides of a sequence having SEQ ID NOs:686-820, and sequences having 90% identity to the foregoing sequences

[0022] In some embodiments, unique C. dublinensis nucleic acid sequences may comprise isolated nucleic acid molecules comprising a nucleotide sequence of SEQ ID NOs: 821-1213, fragments thereof, and/or complements thereof. In some embodiments, unique C. dublinensis sequences may comprise isolated nucleic acid molecules comprising a nucleotide sequence having at least a 90% sequence identity, at least 80% sequence identity and/or at least 70% sequence identity to the nucleotide sequences of SEQ ID NOs: 821-1213, fragments thereof and/or complements thereof.

[0023] In some embodiments, C. dublinensis isolated nucleic acid sequences may comprise nucleic acid molecules comprising at least a 40 nucleotide contiguous sequence of a sequence having SEQ ID NOs: 821-1213; at least a 30 nucleotide contiguous sequence of a sequence having SEQ ID NOs: 821-1213; at least a 25 nucleotide contiguous sequence of a sequence having SEQ ID NOs: 821-1213; at least a 20 nucleotide contiguous sequence of a sequence having SEQ ID NOs: 821-1213; at least a 15 nucleotide contiguous sequence of a sequence having SEQ ID NOs: 821-1213; at least a 10 nucleotide contiguous sequence of a sequence having SEQ ID NOs: 821-1213; or any intermediate number of contiguous sequences from at least about 10 nucleotides of sequence to at least about 40 nucleotides of sequence of a sequence having SEQ ID NOs: 821-1213, and sequences having 90% identity to the foregoing sequences.

[0024] In some embodiments, unique C. sakazakii ST4 strain nucleic acid sequences may comprise isolated nucleic acid molecules comprising a nucleotide sequence having SEQ ID NOs: 1213-1278, fragments thereof, and/or complements thereof. In some embodiments, unique C. sakazakii ST4 strain sequences may comprise isolated nucleic acid molecules comprising a nucleotide sequence having at least a 90% sequence identity, at least 80% sequence identity and/or at least 70% sequence identity to the nucleotide sequences of SEQ ID NOs: 1213-1278, fragments thereof and/or complements thereof.

[0025] In some embodiments, C. sakazakii ST4 strain isolated nucleic acid sequences may comprise nucleic acid molecules comprising at least a 40 nucleotide contiguous sequence of a sequence having SEQ ID NOs: 1213-1278; at least a 30 nucleotide contiguous sequence of a sequence having SEQ ID NOs: 1213-1278; at least a 25; at least a 20 nucleotide contiguous sequence of a sequence having SEQ ID NOs: 1213-1278; at least a 15 nucleotide contiguous sequence of a sequence having SEQ ID NOs: 1213-1278; at least a 10 nucleotide contiguous sequence of a sequence having SEQ ID NOs: 1213-1278; or any intermediate number of contiguous sequences from at least about 10 nucleotides to at least about 40 nucleotides of a sequence having SEQ ID NOs: 1213-1278, and sequences having 90% identity to the foregoing sequences

[0026] In some embodiments, the disclosure describes compositions of isolated nucleic acid sequences having SEQ ID NO:13, SEQ ID NO:14, SEQ ID NO:15, fragments thereof, complements thereof and isolated nucleic acid sequence comprising at least 90% nucleic acid sequence identity to the sequences set forth above.

[0027] In some embodiments, isolated nucleic acid sequence compositions of the disclosure may further comprise one or more label, such as, but not limited to, a dye, a radioactive isotope, a chemiluminescent label, a fluorescent moiety, a bioluminescent label an enzyme, and combinations thereof.

[0028] The disclosure also describes recombinant constructs comprising nucleic acid sequences unique to Cronobacter spp. as set forth in sections above. Accordingly, a recombinant construct of the disclosure may comprise a nucleotide sequence of SEQ ID NO:1, SEQ ID NO:2, SEQ ID NO:3, SEQ ID NO:4, SEQ ID NO:5, SEQ ID NO:6, SEQ ID NO:7, SEQ ID NO:8, SEQ ID NO:9, SEQ ID NO:10, SEQ ID NO:11, SEQ ID NO:12, fragments thereof, complements thereof as well as nucleotide sequences having at least a 90% identity, at least 80% identity and/or at least 70% identity to the nucleotide sequences described above.

[0029] In some embodiments, recombinant constructs may comprise nucleic acid sequences unique to the Cronobacter species comprising a nucleotide sequence of SEQ ID NO: 16-1278, fragments thereof (including fragments having at least 10 contiguous nucleotides thereof), complements thereof as well as nucleotide sequences having at least a 90% identity, at least 80% identity and/or at least 70% identity to the nucleotide sequences described above.

[0030] In some embodiments, a recombinant construct of the disclosure may comprise a nucleotide sequence of SEQ ID NO:13, SEQ ID NO:14, SEQ ID NO:15, complements thereof and isolated nucleic acid sequence comprising at least 90% nucleic acid sequence identity to the sequences set forth above.

[0031] The specification also discloses methods for detection of an organism of Cronobacter spp. organism from a sample, and methods to exclude the presence of an Cronobacter spp. organism in a sample, wherein the detection of at least one nucleic acid sequence that is unique to an Cronobacter spp. is indicative of the presence of an Cronobacter spp. and the absence of detection of any nucleic acid sequence unique to an Cronobacter spp. is indicative of the absence of an Cronobacter spp. in the sample. Accordingly, a method of the disclosure, in some embodiments, may comprise detecting, in a sample, a nucleic acid sequence having at least 10 to at least 25 nucleic acids of SEQ ID NO:1, SEQ ID NO:2, SEQ ID NO:3, SEQ ID NO:4, SEQ ID NO:5, SEQ ID NO:6, SEQ ID NO:7, SEQ ID NO:8, SEQ ID NO:9, SEQ ID NO:10, SEQ ID NO:11, SEQ ID NO:12, and/or complementary sequences thereof, wherein detection of the nucleic acid sequence indicates the presence of a Cronobacter spp. organism in the sample. Methods of detection may also comprise identification steps and may further comprise steps of sample preparation. Such embodiments are described in detail in sections below.

[0032] In some embodiments, the specification also discloses methods of identifying the species of Cronobacter spp. from a sample, wherein detection of at least one nucleic sequence that is unique to one of the six species is indicative of the presence of that particular species. In some embodiments, such a method may comprise detecting a nucleotide sequence of SEQ ID NO: 16-1278, at least 10 contiguous nucleotide fragments thereof, complements thereof to detect the presence of one or more species of Cronobacter.

[0033] For example, in an exemplary embodiment, a method may comprise detecting, in a sample, at least one nucleic acid molecule comprising a nucleotide sequence selected from SEQ ID NO: 16-117, fragments thereof, and/or complements thereof, wherein detection of at least one of these identifies the presence of C. sakazakii. In some embodiments, detecting one of these sequences as listed above is indicative of the absence of other Cronobacter species other than C. sakazakii.

[0034] In another embodiment, a method may comprise detecting, in a sample, at least one nucleic acid molecule comprising a nucleotide sequence selected from SEQ ID NOs: 118-204, fragments thereof, and/or complements thereof, wherein detection of at least one of these sequences is indicative of the presence of C. turicensis. In some embodiments, detecting one of the sequences as listed above is indicative of the absence of other Cronobacter species other than C. turicensis.

[0035] In similar embodiment, a method may comprise detecting, in a sample, at least one nucleic acid molecule comprising a nucleotide sequence selected from SEQ ID NOs:205-273, fragments thereof, and/or complements thereof, wherein detection of at least one of these sequences is indicative of the presence of C. malonaticus. In some embodiments, detection of a sequence as described above is indicative of the absence of other Cronobacter species other than C. malonaticus.

[0036] In similar embodiment, a method may comprise detecting, in a sample, at least one nucleic acid molecule comprising a nucleotide sequence selected from SEQ ID NOs:274-685, fragments thereof, and/or complements thereof, wherein detection of at least one of SEQ ID NOs:274-685 is indicative of the presence of C. muytjensii. In some embodiments, detecting one of these sequences is indicative of the absence of other Cronobacter species other than C. muytjensii.

[0037] In similar embodiment, a method may comprise detecting, in a sample, at least one nucleic acid molecules comprising a nucleotide sequence selected from SEQ ID NO: 686-820, fragments thereof, and/or complements thereof, wherein detection of at least one of the sequences of SEQ ID NO: 686-820 is indicative of the presence of C. genomosp1 in the sample. In some embodiments, detecting the sequences described above is indicative of the absence of other Cronobacter species other than C. genomosp1.

[0038] In similar embodiment, a method may comprise detecting, in a sample, at least one nucleic acid molecule comprising a nucleotide sequence selected from SEQ ID NO: 821-1213, fragments thereof, and/or complements thereof, wherein detection of at least one of the sequences of SEQ ID NO: 821-1213 is indicative of the presence of C. dublinensis. In some embodiments, detection of these sequences as described above is indicative of the absence of other Cronobacter species other than C. dublinensis.

[0039] In another embodiment, a method may comprise detecting, in a sample, at least one nucleic acid molecule comprising a nucleotide sequence selected from SEQ ID NO: 1214-1278, fragments thereof, and/or complements thereof, wherein detection of at least one of these sequences is indicative of the presence of C. sakazakii ST4 strain. In some embodiments, detection of a sequence of SEQ ID NO: 1214-1278, a fragment thereof or a complement thereof is indicative of the absence of other Cronobacter species other than C. sakazakii ST4 strain.

[0040] Some embodiments describe methods of distinguishing a Cronobacter spp. from Enterobacter strains and may comprise: detecting at least one of a nucleic acid sequence having a nucleic acid sequence of SEQ ID NO:1, SEQ ID NO:2, SEQ ID NO:3, SEQ ID NO:4, SEQ ID NO:5, SEQ ID NO:6, SEQ ID NO:7, SEQ ID NO:8, SEQ ID NO:9, SEQ ID NO:10, SEQ ID NO:11, SEQ ID NO:12, fragments thereof, complements thereof and/or sequences comprising at least 90% nucleic acid sequence identity thereof, wherein detection of at least one of the nucleic acid sequences identifies Cronobacter spp. In other embodiments, not detecting at least one of a nucleic acid sequence selected from nucleotides described by either SEQ ID NO:1, SEQ ID NO:2, SEQ ID NO:3, SEQ ID NO:4, SEQ ID NO:5, SEQ ID NO:6, SEQ ID NO:7, SEQ ID NO:8, SEQ ID NO:9, SEQ ID NO:10, SEQ ID NO:11, SEQ ID NO:12, fragments thereof, complements thereof and/or sequences comprising at least 90% nucleic acid sequence identity thereof may be used to exclude the presence of Cronobacter spp. in a sample.

[0041] Some methods for identifying and/or detecting Cronobacter spp. in a sample may comprise using a nucleotide sequence composition of the disclosure for detection. Exemplary compositions of the disclosure used for detection methods may comprise, but are not limited to, SEQ ID NO:13, SEQ ID NO:14, SEQ ID NO:15, complements thereof, isolated nucleic acid sequence comprising at least 90% nucleic acid sequence identity to the sequences set forth above and/or labeled derivatives thereof.

[0042] Some embodiments of the present disclosure are kits for detection of Cronobacter spp. A kit of the disclosure may comprise one or more isolated nucleic acid sequences of the disclosure as set forth herein. Some nucleic acid compositions of the disclosure may comprise primers for amplification of target nucleic acid sequences from a contaminating Cronobacter spp. that may be present in a sample. Some nucleic acid compositions of the disclosure may comprise probes for the detection of target nucleic acid sequences and/or amplified target nucleic acid regions from a contaminating Cronobacter spp. present in a sample. Probes and primers comprised in kits may be labeled. Kits may additionally comprise one or more components such as, but not limited to: buffers, enzymes, nucleotides, salts, reagents to process and prepare samples, probes, primers, agents to enable detection and control nucleotides. Each component of a kit of the disclosure may be packaged individually or together in various combinations in one or more suitable container means. Kits of the disclosure, in some embodiments, may be used to distinguish the presence of non-Cronobacter type bacteria. Some embodiments are also kits for identification of the species of Cronobacter spp. present in a sample.

[0043] Some embodiments of the disclosure relate to computer software algorithms and computer software based methods for standardizing analysis of data obtained during PCR reactions (such as real-time PCR). A computer based method may comprise setting an “optimal threshold value setting” based on a pre-defined percentage of the positive control's maximum plateau value (called dRN). Algorithms and software methods of the disclosure are described in detail in sections below and may advantageously allow for uniform results despite varied user expertise levels and across different labs and test site settings.

### BRIEF DESCRIPTION OF THE DRAWINGS

[0044] Some specific example embodiments of the disclosure may be understood by referring, in part, to the following description and the accompanying drawings, wherein:

[0045] FIG. 1 is a phylogenetic analysis and shows the phylogenetic tree inferred on 100 core genes, the presence of genes from the pan-genome, and the presence of putative virulence genes. The values on the branches are bootstrap values based on 1,000 replicates. FIG. 1A is the neighbor joining tree inferred based on the concatenated DNA sequence alignment of 100 Cronobacter core genes (85,059 nt); FIG. 1B is maximum parsimony tree inferred based on the presence and absence of the 6,156 genes in the pan genome; FIG. 1C is maximum parsimony tree inferred based on the presence and absence of 174 putative virulence genes, including fimbrial clusters, iron uptake system, some C. sakazakii specific genes, and putative type VI seCretion system.

[0046] FIG. 2 is a flowchart showing a software method for PCR data analysis, in accordance with some embodiments of the disclosure.

[0047] FIG. 3A-3D shows schematic diagrams of algorithms comprising multiple example software modules that perform methods for PCR data analysis, in accordance with certain embodiments of the disclosure.

[0048] FIG. 4A shows results for PCR data analysis with artificially set “high” CBT (above the control threshold); and FIG. 4B shows results for PCR data analysis with artificially set “low” CBT (below the control threshold), in comparison to a CBT set by methods of the present disclosure.

[0049] FIG. 5 show data demonstrating that setting a threshold using CBT methods and algorithms of the present disclosure provide consistent analysis of PCR data between five different users.

[0050] FIGS. 6A and 6B depict results of a CBT threshold procedure and show steps of the CBT method where Step 1 comprising position threshold at plateau of positive control and record instrument dRn value which equals 3.32754 is shown in FIG. 6A; and Step 2 shows position threshold at a pre-defined % of plateau of positive control determined in Step 1 which is equal to 0.332754 is shown in FIG. 6B.

[0051] FIG. 7A and FIG. 7B show the amount of variation in threshold setting that would be needed to change the CT by >2.

### DETAILED DESCRIPTION OF EXEMPLARY EMBODIMENTS

[0052] For purposes of interpreting this specification, the following definitions will apply and whenever appropriate, terms used in the singular will also include the plural and vice versa. In the event that any definition set forth below conflicts with the usage of that word in any other document, including any document incorporated herein by reference, the definition set forth below shall always control for purposes of interpreting this specification and its associated claims unless a contrary meaning is clearly intended (for example in the document where the term is originally used). It is noted that, as used in this specification and the appended claims, the singular forms “a,” “an,” and “the,” include plural referents unless expressly and unequivocally limited to one referent. The use of “or” means “and/or” unless stated otherwise. For illustration purposes, but not as a limitation, “X and/or Y” can mean “X” or “Y” or “X and Y”. The use of “comprise,” “comprises,” “comprising,” “having,” “include,” “includes,” and “including” are interchangeable and open terms not intended to be limiting. Furthermore, where the description of one or more embodiments uses the term “comprising,” those skilled in the art would understand that, in some specific instances, the embodiment or embodiments can be alternatively described using the language “consisting essentially of” and/or “consisting of”. The term “and/or” means one or all of the listed elements or a combination of any two or more of the listed element.

[0053] The section headings used herein are for organizational purposes only and are not to be construed as limiting the described subject matter in any way. All literature cited in this specification, including but not limited to, patents, patent applications, articles, books, and treatises are expressly incorporated by reference in their entirety for any purpose. In the event that any of the incorporated literature contradicts any term defined herein, this specification controls. While the present teachings are described in conjunction with various embodiments, it is not intended that the present teachings be limited to such embodiments. On the contrary, the present teachings encompass various alternatives, modifications, and equivalents, as will be appreciated by those of skill in the art.

[0054] The practice of the present embodiments may employ conventional techniques and descriptions of organic chemistry, polymer technology, molecular biology (including recombinant techniques), cell biology, biochemistry, and immunology, which are within the skill of the art, in light of the present teachings. Some conventional techniques include, but may not be limited to, oligonucleotide synthesis, hybridization, extension reactions and detection of hybridization using a label. Specific illustrations of suitable techniques may be described in example herein below. However, other equivalent conventional procedures may also be used. General conventional techniques and their descriptions can be found in standard laboratory manuals such as Genome Analysis: A Laboratory Manual Series (Vols. I-IV), PCR Primer: A Laboratory Manual, and Molecular Cloning: A Laboratory Manual (all from Cold Spring Harbor Laboratory Press, 1989), Gait, “Oligonucleotide Synthesis: A Practical Approach” 1984, IRL Press, London, Nelson and Cox (2000), Lehninger, Principles of Biochemistry 3^{rd} Ed., W. H. Freeman Pub., New York, N.Y. and Berg et al. (2002) Biochemistry, 5^{th} Ed., W. H. Freeman Pub., New York, N.Y. all of which are herein incorporated in their entirety by reference for all purposes.

[0055] The terms “amplifying” and “amplification” are used in a broad sense and refer to any technique by which a target region, an amplicon, or at least part of an amplicon, is reproduced or copied (including the synthesis of a complementary strand), typically in a template-dependent manner, including a broad range of techniques for amplifying nucleic acid sequences, either linearly or exponentially. Some non-limiting examples of amplification techniques include primer extension, including the polymerase chain reaction (PCR), reverse transcription polymerase chain reaction (RT-PCR), asynchronous PCR (A-PCR), and asymmetric PCR (AM-PCR), strand displacement amplification (SDA), multiple displacement amplification (MDA), nucleic acid strand-based amplification (NASBA), rolling circle amplification (RCA), transcription-mediated amplification (TMA), and the like, including multiplex versions, and combinations thereof. Descriptions of certain amplification techniques can be found in, among other places, Molecular Cloning, A Laboratory Manual, Cold Spring Harbor Press, 3d ed., 2001 (hereinafter “Sambrook and Russell”); Sambrook et al.; Ausubel et al.; PCR Primer: A Laboratory Manual, Diffenbach, Ed., Cold Spring Harbor Press (1995); Msuih et al., J. Clin. Micro. 34:501-07 (1996); McPherson; Rapley; U.S. Pat. Nos. 6,027,998 and 6,511,810; PCT Publication Nos. WO 97/31256 and WO 01/92579; Ehrlich et al., Science 252:1643-50 (1991); Favis et al., Nature Biotechnology 18:561-64 (2000); Protocols & Applications Guide, rev. 9/04, Promega, Madison, Wis.; and Rabenau et al., Infection 28:97-102 (2000).

[0056] The terms “amplicon,” “amplification product” and “amplified sequence” are used interchangeably herein and refer to a broad range of techniques for increasing polynucleotide sequences, either linearly or exponentially and can be the product of an amplification reaction. An amplicon can be double-stranded or single-stranded, and can include the separated component strands obtained by denaturing a double-stranded amplification product. In certain embodiments, the amplicon of one amplification cycle can serve as a template in a subsequent amplification cycle. Exemplary amplification techniques include, but are not limited to, PCR or any other method employing a primer extension step. Other nonlimiting examples of amplification include, but are not limited to, ligase detection reaction (LDR) and ligase chain reaction (LCR). Amplification methods can comprise thermal-cycling or can be performed isothermally. In various embodiments, the term “amplification product” and “amplified sequence” includes products from any number of cycles of amplification reactions.

[0057] As used herein, the “polymerase chain reaction” or PCR is a an amplification of nucleic acid consisting of an initial denaturation step which separates the strands of a double stranded nucleic acid sample, followed by repetition of (i) an annealing step, which allows amplification primers to anneal specifically to positions flanking a target sequence; (ii) an extension step which extends the primers in a 5′ to 3′ direction thereby forming an amplicon polynucleotide complementary to the target sequence, and (iii) a denaturation step which causes the separation of the amplicon from the target sequence (Mullis et al., eds, The Polymerase Chain Reaction, BirkHauser, Boston, Mass. (1994). Each of the above steps may be conducted at a different temperature, preferably using an automated thermocycler (Applied Biosystems LLC, a division of Life Technologies Corporation, Foster City, Calif.). If desired, RNA samples can be converted to DNA/RNA heteroduplexes or to duplex cDNA by methods known to one of skill in the art.

[0058] As used herein, “amplifying” and “amplification” refers to a broad range of techniques for increasing polynucleotide sequences, either linearly or exponentially. Exemplary amplification techniques include, but are not limited to, PCR or any other method employing a primer extension step. Other nonlimiting examples of amplification include, but are not limited to, ligase detection reaction (LDR) and ligase chain reaction (LCR). Amplification methods may comprise thermal-cycling or may be performed isothermally. In various embodiments, the term “amplification product” includes products from any number of cycles of amplification reactions.

[0059] In certain embodiments, amplification methods comprise at least one cycle of amplification, for example, but not limited to, the sequential procedures of: hybridizing primers to primer-specific portions of target sequence or amplification products from any number of cycles of an amplification reaction; synthesizing a strand of nucleotides in a template-dependent manner using a polymerase; and denaturing the newly-formed nucleic acid duplex to separate the strands. The cycle may or may not be repeated.

[0060] Descriptions of certain amplification techniques can be found, among other places, in H. Ehrlich et al., Science, 252:1643-50 (1991), M. Innis et al., PCR Protocols: A Guide to Methods and Applications, Academic Press, New York, N.Y. (1990), R. Favis et al., Nature Biotechnology 18:561-64 (2000), and H. F. Rabenau et al., Infection 28:97-102 (2000); Sambrook and Russell, Molecular Cloning, Third Edition, Cold Spring Harbor Press (2000) (hereinafter “Sambrook and Russell”), Ausubel et al., Current Protocols in Molecular Biology (1993) including supplements through September 2005, John Wiley & Sons (hereinafter “Ausubel et al.”).

[0061] The term “label” refers to any moiety which can be attached to a molecule and: (i) provides a detectable signal; (ii) interacts with a second label to modify the detectable signal provided by the second label, e.g. FRET; (iii) stabilizes hybridization, i.e. duplex formation; or (iv) provides a capture moiety, i.e. affinity, antibody/antigen, ionic complexation. Labelling can be accomplished using any one of a large number of known techniques employing known labels, linkages, linking groups, reagents, reaction conditions, and analysis and purification methods. Labels include light-emitting compounds which generate a detectable signal by fluorescence, chemiluminescence, or bioluminescence (Kricka, L. in Nonisotopic DNA Probe Techniques (1992), Academic Press, San Diego, pp. 3-28). Another class of labels are hybridization-stabilizing moieties which serve to enhance, stabilize, or influence hybridization of duplexes, e.g. intercalators, minor-groove binders, and cross-linking functional groups (Blackburn, G. and Gait, M. Eds. “DNA and RNA structure” in Nucleic Acids in Chemistry and Biology, 2.sup.nd Edition, (1996) Oxford University Press, pp. 15-81). Yet another class of labels effect the separation or immobilization of a molecule by specific or non-specific capture, for example biotin, digoxigenin, and other haptens (Andrus, A. “Chemical methods for 5′ non-isotopic labelling of PCR probes and primers” (1995) in PCR 2: A Practical Approach, Oxford University Press, Oxford, pp. 39-54).

[0062] The terms “annealing” and “hybridization” are used interchangeably and mean the base-pairing interaction of one nucleic acid with another nucleic acid that results in formation of a duplex or other higher-ordered structure. The primary interaction is base specific, i.e. A/T and G/C, by Watson/Crick and Hoogsteen-type hydrogen bonding.

[0063] The term “end-point analysis” refers to a method where data collection occurs only when a reaction is substantially complete.

[0064] The term “real-time analysis” refers to periodic monitoring during PCR. Certain systems such as the ABI 7700 Sequence Detection System (Applied Biosystems, Foster City, Calif.) conduct monitoring during each thermal cycle at a pre-determined or user-defined point. Real-time analysis of PCR with FRET probes measures fluorescent dye signal changes from cycle-to-cycle, preferably minus any internal control signals.

[0065] As used herein, the term “Ct” represents the PCR cycle number when the signal is first recorded as statistically significant.

[0066] The term “quenching” refers to a decrease in fluorescence of a first moiety (reporter dye) caused by a second moiety (quencher) regardless of the mechanism.

[0067] A “primer,” as used herein, is an oligonucleotide that is complementary to a portion of target polynucleotide and, after hybridization to the target polynucleotide, may serve as a starting-point for an amplification reaction and the synthesis of an amplification product. Primers include, but are not limited to, spanning primers. A “primer pair” refers to two primers that can be used together for an amplification reaction. A “PCR primer” refers to a primer in a set of at least two primers that are capable of exponentially amplifying a target nucleic acid sequence in the polymerase chain reaction.

[0068] The term “probe” comprises a polynucleotide that comprises a specific portion designed to hybridize in a sequence-specific manner with a complementary region of a specific nucleic acid sequence, e.g., a target nucleic acid sequence. In certain embodiments, the specific portion of the probe may be specific for a particular sequence, or alternatively, may be degenerate, e.g., specific for a set of sequences. In certain embodiments, the probe is labeled. The probe can be an oligonucleotide that is complementary to at least a portion of an amplification product formed using two primers.

[0069] The terms “complement” and “complementary” as used herein, refer to the ability of two single stranded polynucleotides (for instance, a primer and a target polynucleotide) to base pair with each other, where an adenine on one strand of a polynucleotide will base pair to a thymine or uracil on a strand of a second polynucleotide and a cytosine on one strand of a polynucleotide will base pair to a guanine on a strand of a second polynucleotide. Two polynucleotides are complementary to each other when a nucleotide sequence in one polynucleotide can base pair with a nucleotide sequence in a second polynucleotide. For instance, 5′-ATGC and 5′-GCAT are complementary.

[0070] A “label” refers to a moiety attached (covalently or non-covalently), or capable of being attached, to an oligonucleotide, which provides or is capable of providing information about the oligonucleotide (e.g., descriptive or identifying information about the oligonucleotide) or another polynucleotide with which the labeled oligonucleotide interacts (e.g., hybridizes). Labels can be used to provide a detectable (and optionally quantifiable) signal. Labels can also be used to attach an oligonucleotide to a surface.

[0071] A “fluorophore” is a moiety that can emit light of a particular wavelength following absorbance of light of shorter wavelength. The wavelength of the light emitted by a particular fluorophore is characteristic of that fluorophore. Thus, a particular fluorophore can be detected by detecting light of an appropriate wavelength following excitation of the fluorophore with light of shorter wavelength.

[0072] The term “quencher” as used herein refers to a moiety that absorbs energy emitted from a fluorophore, or otherwise interferes with the ability of the fluorescent dye to emit light. A quencher can re-emit the energy absorbed from a fluorophore in a signal characteristic for that quencher, and thus a quencher can also act as a fluorophore (a fluorescent quencher). This phenomenon is generally known as fluorescent resonance energy transfer (FRET). Alternatively, a quencher can dissipate the energy absorbed from a fluorophore as heat (a non-fluorescent quencher).

[0073] As used herein, “detecting” or “detection” refers to the disclosure or revelation of the presence or absence in a sample of a target polynucleotide sequence or amplified target polynucleotide sequence product. The detecting can be by end point, real-time, enzymatic, and by resolving the amplification product on a gel and determining whether the expected amplification product is present, or other methods known to one of skill in the art.

[0074] The presence or absence of an amplified product can be determined or its amount measured. Detecting an amplified product can be conducted by standard methods well known in the art and used routinely. The detecting may occur, for instance, after multiple amplification cycles have been run (typically referred to an end-point analysis), or during each amplification cycle (typically referred to as real-time). Detecting an amplification product after multiple amplification cycles have been run is easily accomplished by, for instance, resolving the amplification product on a gel and determining whether the expected amplification product is present. In order to facilitate real-time detection or quantification of the amplification products, one or more of the primers and/or probes used in the amplification reaction can be labeled, and various formats are available for generating a detectable signal that indicates an amplification product is present. For example, a convenient label is typically a label that is fluorescent, which may be used in various formats including, but are not limited to, the use of donor fluorophore labels, acceptor fluorophore labels, fluorophores, quenchers, and combinations thereof. Assays using these various formats may include the use of one or more primers that are labeled (for instance, scorpions primers, amplifluor primers), one or more probes that are labeled (for instance, adjacent probes, TaqMan® probes, light-up probes, molecular beacons), or a combination thereof. The skilled person will understand that in addition to these known formats, new types of formats are routinely disclosed. The present invention is not limited by the type of method or the types of probes and/or primers used to detect an amplified product. Using appropriate labels (for example, different fluorophores) it is possible to combine (multiplex) the results of several different primer pairs (and, optionally, probes if they are present) in a single reaction. As an alternative to detection using a labeled primer and/or probe, an amplification product can be detected using a polynucleotide binding dye such as a fluorescent DNA binding dye. Examples include, for instance, SYBR® Green dye or SYBR® Gold dye (Molecular Probes). Upon interaction with the double-stranded amplification product, such polynucleotide binding dyes emit a fluorescence signal after excitation with light at a suitable wavelength. A polynucleotide binding dye such as a polynucleotide intercalating dye also can be used.

[0075] PCR is an extremely powerful technique for amplifying specific polynucleotide sequences, including genomic DNA, single-stranded cDNA, and mRNA among others. Various methods of conducting PCR amplification and primer design and construction for PCR amplification will be known to those of skill in the art. Generally, in PCR a double-stranded DNA to be amplified is denatured by heating the sample. New DNA synthesis is then primed by hybridizing primers to the target sequence in the presence of DNA polymerase and excess dNTPs. In subsequent cycles, the primers hybridize to the newly synthesized DNA to produce discreet products with the primer sequences at either end. The products accumulate exponentially with each successive round of amplification.

[0076] The DNA polymerase used in PCR is often a thermostable polymerase. This allows the enzyme to continue functioning after repeated cycles of heating necessary to denature the double-stranded DNA. Polymerases that are useful for PCR include, for example, Taq DNA polymerase, Tth DNA polymerase, Tfl DNA polymerase, Tma DNA polymerase, Tli DNA polymerase, and Pfu DNA polymerase. There are many commercially available modified forms of these enzymes including. AmpliTaq® and AmpliTaq Gold® both available from Applied Biosystems. Many are available with or without a 3- to 5′ proofreading exonuclease activity. See, for example, Vent® and Vent®. (exo-) available from New England Biolabs.

[0077] Other suitable amplification methods include the ligase chain reaction (LCR) (e.g., Wu and Wallace, Genomics 4, 560 (1989) and Landegren et al., Science 241, 1077 (1988)), transcription amplification (Kwoh et al., Proc. Natl. Acad. Sci. USA 86, 1173 (1989)), and self-sustained sequence replication (Guatelli et al., Proc. Nat. Acad. Sci. USA, 87, 1874 (1990)) and nucleic acid based sequence amplification (NABSA). (See, U.S. Pat. Nos. 5,409,818, 5,554517, and 6,063,603). The latter two amplification methods include isothermal reactions based on isothermal transcription, which produce both single-stranded RNA (ssRNA) and double-stranded DNA (dsDNA) as the amplification products in a ratio of about 30 or 100 to 1, respectively.

[0078] As used herein, the term “analyzing” refers to evaluating and comparing the results of a method. In some exemplary embodiments, “analyzing” refers to evaluating and comparing the results of a sample tested to a second sample and/or to a control in a method of the disclosure.

[0079] As used herein, “complement” and “complements” are used interchangeably and refer to the ability of a nucleotide, a polynucleotide or two single stranded polynucleotides (for instance, a primer and a target polynucleotide) to base pair with each other, where an adenine on one strand of a polynucleotide will base pair to a thymine or uracil on a strand of a second polynucleotide and a cytosine on one strand of a polynucleotide will base pair to a guanine on a strand of a second polynucleotide. Two polynucleotides are complementary to each other when a nucleotide sequence in one polynucleotide can base pair with a nucleotide sequence in a second polynucleotide. For instance, 5′-ATGC-3′ and 5′-GCAT-3′ are complementary.

[0080] As used herein the term “complementary nucleotide sequence” and “complementary sequences” refers to a (second) nucleotide sequence which, by base pairing, is the complement of a first nucleotide sequence. For example, a forward strand with the sequence 5′-ATGGC-3′ would have the complementary nucleotide sequence 3′-TACCG-5′, also termed the “reverse strand.”

[0081] As used herein, the term “contacting” as used herein refers to the hybridization between a primer and its substantially complementary region. “Contacting” may also refer to bringing in contact at least two moieties (reagents, cells, nucleic acids) to bring about a change or a reaction in one or all the moieties. The process of contacting may also comprise “incubating” (contacting for a certain time lengths) and/or incubating at certain temperatures to bring about the change or reaction.

[0082] As used herein, “DNA” refers to deoxyribonucleic acid in its various forms as understood in the art, such as genomic DNA, cDNA, isolated nucleic acid molecules, vector DNA, and chromosomal DNA. “Nucleic acid” refers to DNA or RNA in any form. Examples of isolated nucleic acid molecules include, but are not limited to, recombinant DNA molecules contained in a vector, recombinant DNA molecules maintained in a heterologous host cell, partially or substantially purified nucleic acid molecules, and synthetic DNA molecules. Typically, an “isolated” nucleic acid is free of sequences which naturally flank the nucleic acid (i.e., sequences located at the 5′ and 3′ ends) in the native nucleic acid or genomic DNA of the organism from which the nucleic acid is derived. Moreover, an “isolated” nucleic acid molecule, such as a cDNA molecule, is generally substantially free of other cellular material when isolated from a cell and/or culture medium when produced by recombinant techniques, and/or substantially free of chemical precursors or other chemicals when chemically synthesized.

[0083] The terms “detecting” and “detection” are used in a broad sense herein and encompass any technique by which one can determine the absence or presence of something, and/or identify a nucleic acid sequence and/or a protein encoded by a nucleic acid sequence. In some embodiments, detecting comprises quantitating a detectable signal from the nucleic acid, including without limitation, a real-time detection method, such as quantitative PCR (“Q-PCR”). In some embodiments, detecting comprises determining the sequence of a sequencing product or a family of sequencing products generated using an amplification product as the template; in some embodiments, such detecting comprises obtaining the sequence of a family of sequencing products.

[0084] As used here, “distinguishing” and “distinguishable” are used interchangeably and refer to differentiating between at least two results from substantially similar or identical reactions, including but not limited to, two different amplification products, two different melting temperatures, two different melt curves, and the like. The results can be from a single reaction, two reactions conducted in parallel, two reactions conducted independently, i.e., separate days, operators, laboratories, and so on.

[0085] As used herein, the term “Cronobacter spp.-specific nucleotide sequence” and “a nucleic acid sequence unique to Cronobacter spp.” refers broadly to nucleotide sequences specific and/or unique to the eleven strains of Cronobacter spp. and not known or found in other Enterobacter strains or in other related and/or unrelated microorganisms. These sequences are shared by all eleven Cronobacter genomes with at least 95% identity, but are at least 20% divergent in all the other 45 Enterobacter genomes. These sequences do not include sequences with at least 80% identity over 50 or more nucleotides with the GenBank bacterial, viral, fungal and plant sequences when compared using BLASTN. These include, but are not limited to, nucleic acid sequences comprised in SEQ ID NO: 1, SEQ ID NO:2, SEQ ID NO: 3, SEQ ID NO:4, SEQ ID NO:5, SEQ ID NO:6, SEQ ID NO:7, SEQ ID NO:8, SEQ ID NO:9, SEQ ID NO:10, SEQ ID NO:11, SEQ ID NO:12, as well as fragments, complements, and sequences having at least 90% sequence identity thereof.

[0086] As used herein, the term “homology” refers to a degree of complementarity at the nucleic acid level that can be determined by known methods, e.g. computer-assisted sequence comparisons (Basic local alignment search tool, S. F. Altschul et al., J. Mol. Biol. 215 (1990), 403 410). The term “homology” known to the skilled person describes the degree to which two or more nucleic acid molecules are related, this being determined by the concordance between the sequences. The percentage of “homology” is obtained from the percentage of identical regions in two or more sequences, taking into account gaps or other sequence peculiarities. The homology of nucleic acid molecules which are related to one another can be determined with the aid of known methods. As a rule, special computer programs with algorithms which take account of the particular requirements are employed. There can be partial homology or complete homology (i.e., identity). A partially complementary sequence that at least partially inhibits a completely complementary sequence from hybridizing to a target nucleic acid is referred to using the functional term “substantially homologous.”

[0087] The term “selectively hybridize” and variations thereof means that under appropriate stringency conditions, a given sequence (for example, but not limited to, a primer) anneals with a second sequence comprising a complementary string of nucleotides (for example but not limited to a target flanking sequence or a primer-binding site of an amplicon), but does not anneal to undesired sequences, such as non-target nucleic acids or other primers. Typically, as the reaction temperature increases toward the melting temperature of a particular double-stranded sequence, the relative amount of selective hybridization generally increases and mis-priming generally decreases. In this specification, a statement that one sequence hybridizes or selectively hybridizes with another sequence encompasses situations where the entirety of both of the sequences hybridize to one another and situations where only a portion of one or both of the sequences hybridizes to the entire other sequence or to a portion of the other sequence.

[0088] The terms “identity”, “nucleic acid sequence identity” and “sequence identity” are used interchangeably and refer to the percentage of pair-wise identical residues—following homology alignment of a sequence of a polynucleotide with a sequence in question—with respect to the number of residues in the longer of these two sequences. The term “identity” as known in the art refers to a relationship between the sequences of two or more polypeptide molecules or two or more nucleic acid molecules, as determined by comparing the sequences. In the art, “identity” also means the degree of sequence relatedness between nucleic acid molecules or polypeptides, as the case may be, as determined by the match between strings of two or more nucleotide or two or more amino acid sequences. “Identity” measures the percent of identical matches between the smaller of two or more sequences with gap alignments (if any) addressed by a particular mathematical model or computer program (i.e., “algorithms”).

[0089] The term “percent (%) nucleic acid sequence identity” with respect to a nucleic acid sequence refers to the percentage of nucleotides in a first sequence that are identical with the nucleotides in a second nucleic acid sequence of interest, after aligning the sequences and introducing gaps, if necessary, to achieve the maximum percent sequence identity. Alignment for purposes of determining percent nucleic acid sequence identity can be achieved in various ways that are known to one of skill in the art, for instance, using publicly available computer software such as NCBI-BLAST, WU-BLAST, MUMmer or MAUVE software.

[0090] Percent nucleic acid sequence identity may also be determined using the sequence comparison program NCBI-BLAST or WU-BLAST (Altschul et al., Nucleic Acids Res. 25:3389-3402 (1997)). The NCBI-BLAST sequence comparison program may be downloaded from http://www.ncbi.nlm.nih.gov or otherwise obtained from the National Institute of Health, Bethesda, Md. The WU-BLAST sequence comparison program may be downloaded from http://blast.wustl.edu/. NCBI-BLAST uses several search parameters, wherein all of those search parameters are set to default values including, for example, unmask=yes, strand=all, expected occurrences=10, minimum low complexity length=15/5, multi-pass e-value=0.01, constant for multi-pass=25, dropoff for final gapped alignment=25 and scoring matrix=BLOSUM62.

[0091] In situations where NCBI-BLAST or WU-BLAST is employed for sequence comparisons, the % nucleic acid sequence identity of a given nucleic acid sequence C to, with, or against a given nucleic acid sequence D (which can alternatively be phrased as a given nucleic acid sequence C that has or comprises a certain % nucleic acid sequence identity to, with, or against a given nucleic acid sequence D) is calculated as follows: 100 times the fraction W/Z where W is the number of nucleotides scored as identical matches by the sequence alignment program NCBI-BLAST or WU-BLAST in that program's alignment of C and D, and where Z is the total number of nucleotides in D. It will be appreciated that where the length of nucleic acid sequence C is not equal to the length of nucleic acid sequence D, the % nucleic acid sequence identity of C to D will not equal the % nucleic acid sequence identity of D to C.

[0092] As used herein, the terms “polynucleotide”, “oligonucleotide”, and “nucleic acid sequences” are used interchangeably and refer to single-stranded and double-stranded polymers of nucleotide monomers, including without limitation 2′-deoxyribonucleotides (DNA) and ribonucleotides (RNA) linked by internucleotide phosphodiester bond linkages, or internucleotide analogs, and associated counter ions, e.g., H⁺, NH₄⁺, trialkylammonium, Mg²⁺, Na⁺, and the like. A polynucleotide may be composed entirely of deoxyribonucleotides, entirely of ribonucleotides, or chimeric mixtures thereof and can include nucleotide analogs. The nucleotide monomer units may comprise any nucleotide or nucleotide analog. Polynucleotides typically range in size from a few monomeric units, e.g. 5-40 when they are sometimes referred to in the art as oligonucleotides, to several thousands of monomeric nucleotide units. Unless denoted otherwise, whenever a polynucleotide sequence is represented, it will be understood that the nucleotides are in 5′ to 3′ order from left to right and that “A” denotes deoxyadenosine, “C” denotes deoxycytosine, “G” denotes deoxyguanosine, “T” denotes thymidine, and “U” denotes deoxyuridine, unless otherwise noted.

[0093] As used herein, the terms “target polynucleotide,” “nucleic acid target” and “target nucleic acid” are used interchangeably and refer to a particular nucleic acid sequence of interest. The “target” can be a polynucleotide sequence that is sought to be amplified and can exist in the presence of other nucleic acid molecules or within a larger nucleic acid molecule. The target polynucleotide can be obtained from any source, and can comprise any number of different compositional components. For example, the target can be a nucleic acid (e.g. DNA or RNA). It will be appreciated that target polynucleotides can be cut or sheared prior to analysis, including the use of such procedures as mechanical force, sonication, restriction endonuclease cleavage, or other methods known in the art.

[0094] As used herein “preparing” or “preparing a sample” or “processing” or processing a sample” refers to one or more of the following steps to achieve extraction and separation of a nucleic acid from a sample: (1) bacterial enrichment, (2) separation of bacterial cells from the sample, (3) cell lysis, and (4) nucleic acid extraction and/or purification (e.g., DNA extraction, total DNA extraction, genomic DNA extraction, RNA extraction). Embodiments of the nucleic acid extracted include, but are not limited to, DNA, RNA, mRNA and miRNA.

[0095] As used herein, “presence” refers to the existence (and therefore to the detection) of a reaction, a product of a method or a process (including but not limited to, an amplification product resulting from an amplification reaction), or to the “presence” and “detection” of an organism such as a pathogenic organism or a particular strain or species of an organism.

[0096] The term “primer” refers to a polynucleotide and analogs thereof that are capable of selectively hybridizing to a target nucleic acid or a “template,” a target region flanking sequence or to a corresponding primer-binding site of an amplification product; and allows detection of a double-stranded nucleic acid formed by hybridization or the synthesis of a sequence complementary to the corresponding polynucleotide template, flanking sequence or amplification product from the primer's 3′ end. Typically a primer can be between about 10 to 100 nucleotides in length and can provide a point of initiation for template-directed synthesis of a polynucleotide complementary to the template, which can take place, in the presence of appropriate enzyme(s), cofactors, substrates such as nucleotides and the like.

[0097] As used herein, the term “amplification primer” refers to an oligonucleotide, capable of annealing to an RNA or DNA region adjacent a target nucleic acid sequence, and serving as an initiation primer for nucleic acid synthesis under suitable conditions well known in the art. Typically, a PCR reaction employs a pair of amplification primers including an “upstream” or “forward” primer and a “downstream” or “reverse” primer, which delimit a region of the RNA or DNA to be amplified.

[0098] As used herein, the term “primer-binding site” refers to a region of a polynucleotide sequence, typically a sequence flanking a target region and/or an amplicon that can serve directly, or by virtue of its complement, as the template upon which a primer can anneal for any suitable primer extension reaction known in the art, for example, but not limited to, PCR. It will be appreciated by those of skill in the art that when two primer-binding sites are present on a single polynucleotide, the orientation of the two primer-binding sites is generally different. For example, one primer of a primer pair is complementary to and can hybridize with the first primer-binding site, while the corresponding primer of the primer pair is designed to hybridize with the complement of the second primer-binding site. Stated another way, in some embodiments the first primer-binding site can be in a sense orientation, and the second primer-binding site can be in an antisense orientation. A primer-binding site of an amplicon may, but need not comprise the same sequence as or at least some of the sequence of the target flanking sequence or its complement.

[0099] The terms “reporter probe” and “probe” are used interchangeably and refer to a detectable sequence of nucleotides or a detectable sequence of nucleotide analogs operable to specifically anneal with a corresponding amplicon, such as but not limited to, a target nucleic acid sequence and/or a PCR product and is further operable to be detected or identified. Reporter probes or probes may be detectable by a variety of methods, including but not limited to, detecting color, detecting radiation, fluorescence, luminescence, emitted wavelengths. In some embodiments, detecting a change in intensity, a change in radiation, a change in an emitted wavelength, a change in fluorescence, a change in luminescence, or a change in color or intensity of color may be used to identify and/or quantify a corresponding amplicon or a target polynucleotide. In one exemplary embodiment, by indirectly detecting an amplicon from a sample or processed sample, one can determine that a microorganism having a corresponding target sequence is present in a sample. Most reporter probes can be categorized based on their mode of action, for example but not limited to: nuclease probes, including without limitation TaqMan® probes; extension probes including without limitation scorpion primers, Lux™ primers, Amplifluors, and the like; and hybridization probes including without limitation molecular beacons, Eclipse probes, light-up probes, pairs of singly-labeled reporter probes, hybridization probe pairs, and the like. In certain embodiments, reporter probes may comprise an amide bond, an LNA, a universal base, and/or combinations thereof, and may include stem-loop and/or stem-less reporter probe configurations. Certain reporter probes may be singly-labeled, while other reporter probes are doubly-labeled. Dual probe systems that comprise FRET between adjacently hybridized probes are within the intended scope of the term reporter probe. In certain embodiments, a reporter probe may comprise a fluorescent reporter group and a quencher (including without limitation dark quenchers and fluorescent quenchers). Some non-limiting examples of reporter probes include TaqMan® probes; Scorpion probes (also referred to as scorpion primers); Lux™ primers; FRET primers; Eclipse probes; molecular beacons, including but not limited to FRET-based molecular beacons, multicolor molecular beacons, aptamer beacons, PNA beacons, and antibody beacons; labeled PNA clamps, labeled PNA openers, labeled LNA probes, and probes comprising nanocrystals, metallic nanoparticles and similar hybrid probes (see, e.g., Dubertret et al., Nature Biotech., 19:365-70, 2001; Zelphati et al., BioTechniques 28:304-15, 2000). In certain embodiments, reporter probes may further comprise minor groove binders including but not limited to TaqMan® MGB probes and TaqMan® MGB-NFQ probes (both from Applied Biosystems). In certain embodiments, reporter probe detection may comprise fluorescence polarization detection (see, e.g., Simeonov and Nikiforov, Nucl. Acids Res. 30:E91, 2002).

[0100] Those skilled in the art understand that as a target nucleic acid region (target sequence) is amplified by an amplification means, the complement of the primer-binding site is synthesized in the complementary amplicon or the complementary strand of the amplicon. Accordingly, it is to be understood that the complement of a primer-binding site is expressly included within the intended meaning of the term primer-binding site, as used herein.

[0101] As used herein, the term “genome” refers to the complete nucleic acid sequence, containing the entire genetic information, of a bacterium, a virus, a plasmid, a gamete, an individual, a population, a species, or a strain of a species.

[0102] As used herein, the term “pseudochromosome” refers to the concatenation, in their most likely order, of all available sequence contigs and scaffolds derived from sequencing of a bacterial genome, in which undefined gaps between contigs and scaffolds are represented by unidentified nucleobases.

[0103] As used herein, the term “genomic DNA” refers to the chromosomal DNA sequence of a gene or segment of a gene including the DNA sequence of non-coding as well as coding regions. Genomic DNA also refers to DNA isolated directly from cells, chromosomes or plasmid(s) within the genome of an organism, or cloned copies of all or part of such DNA.

[0104] As used herein the term “sample” refers to a starting material suspected of harboring a particular microorganism or group of microorganisms. A “contaminated sample” refers to a sample harboring a pathogenic microbe thereby comprising nucleic acid material from the pathogenic microbe. Examples of samples include, but are not limited to, food samples (including but not limited to samples from food intended for human or animal consumption such as processed foods, raw food material, produce (e.g., fruit and vegetables), legumes, meats (from livestock animals and/or game animals), fish, sea food, nuts, beverages, drinks, fermentation broths, and/or a selectively enriched food matrix comprising any of the above listed foods), infant formulas, infant food, water samples, environmental samples (e.g., soil samples, dirt samples, garbage samples, sewage samples, industrial effluent samples, air samples, or water samples from a variety of water bodies such as lakes, rivers, ponds etc.,), air samples (from the environment or from a room or a building), forensic samples, agricultural samples, pharmaceutical samples, biopharmaceutical samples, samples from food processing and manufacturing surfaces, and/or biological samples. A “biological sample” refers to a sample obtained from eukaryotic or prokaryotic sources. Examples of eukaryotic sources include mammals, such as a human, a cow, a pig, a chicken, a turkey, a livestock animal, a fish, a crab, a crustacean, a rabbit, a game animal, and/or a member of the family Muridae (a murine animal such as rat or mouse). A biological sample may include blood, urine, feces, or other materials from a human or a livestock animal. A biological sample can be, for instance, in the form of a single cell, in the form of a tissue, or in the form of a fluid.

[0105] A sample may be tested directly, or may be prepared or processed in some manner prior to testing. For example, a sample may be processed to enrich any contaminating microbe and may be further processed to separate and/or lyse microbial cells contained therein. Lysed microbial cells from a sample may be additionally processed or prepares to separate, isolate and/or extract genetic material from the microbe for analysis to detect and/or identify the contaminating microbe. Analysis of a sample may include one or more molecular methods. For example, according to some exemplary embodiments of the present disclosure, a sample may be subject to nucleic acid amplification (for example by PCR) using appropriate oligonucleotide primers that are specific to one or more microbe nucleic acid sequences that the sample is suspected of being contaminated with. Amplification products may then be further subject to testing with specific probes (or reporter probes) to allow detection of microbial nucleic acid sequences that have been amplified from the sample. In some embodiments, if a microbial nucleic acid sequence is amplified from a sample, further analysis may be performed on the amplification product to further identify, quantify and analyze the detected microbe (determine parameters such as but not limited to the microbial strain, pathogenecity, quantity etc.).

[0106] Recitation of numerical ranges by endpoints in this specification include all numbers subsumed within that range (e.g., 1 to 5 includes 1, 1.5, 2, 2.75, 3, 3.80, 4, 5, etc.).

[0107] Various embodiments of the present teachings relate to compositions, methods and kits for identification of a Cronobacter spp. microorganism. Cronobacter spp. is known to cause human disease, especially in infants, and hence is a pathogen that is a potential food contaminant, an environmental contaminant and may cause life threatening neo-natal infections.

[0108] One embodiment of the disclosure identifies signature sequences that are present only in Cronobacter spp. and absent in non-Cronobacter species as well as other closely related bacterial species. In some embodiments, the disclosure identifies signature sequences that are present only in a particular Cronobacter species but are absent from other Cronobacter species. These sequences can be used to design molecular assays, such as but not limited to PCR, real-time PCR assays, hybridization based methods, which specifically detect and distinguish Cronobacter spp. from non-Cronobacter species and in some embodiments specifically detect and distinguish one Cronobacter species from another. Examples of such assays are described as methods of the disclosure. In some embodiments, the assays described herein can be used for pathogen testing for the presence of Cronobacter contamination in food samples, such as but not limited to infant formula, infant and baby food products and beverages.

[0109] The signature sequences described here can be used to design compositions comprising probes and primers that can be used in one or more molecular methods of detecting the presence of a Cronobacter contaminant in a sample as well as for distinguishing different species of Cronobacter from each other (for example to identify a contaminant and/or to diagnose what organism is causing a disease while testing a clinical sample as well as for applications such as for tracking source of infection and/or identifying cause of infection. Compositions designed herein based on one or more signature sequences can be formulated and packaged into kits. Alternatively, signature sequences and fragments/complements thereof can be used in applications such as generic identification of pathogens including species of pathogens in chip arrays and/or barcodes on sequencing platforms.

[0110] The present disclosure, in some embodiments discloses nucleotide sequences specific to Cronobacter spp. (shared by all eleven strains) and discloses detection assays designed using nucleotide sequences specific for different serotypes. The specific and unique sequences (also referred to herein as signature sequences) were discovered by whole-genome sequencing of nine strains of Cronobacter spp. The entire genome sequences of the nine strains of Cronobacter spp. were sequenced and the genomic information was analyzed to design highly specific Cronobacter spp. assays. Embodiments relating to sequencing Cronobacter spp. are described in the section entitled Examples.

[0111] Various embodiments of the present teachings relate to compositions based on newly discovered genomic sequence regions specific and unique to Cronobacter spp. The unique and specific sequences of Cronobacter spp as well as sequences unique to different species of Cronobacter are described in SEQ ID NOs:1-12 and SEQ ID NOs: 16-1278. Example compositions of the disclosure include isolated sequences that are uniquely found in all the eleven strains of Cronobacter spp. but not in other closely related Enterobacter strains. These include, in some exemplary embodiments, at least isolated nucleic acid sequences described herein as SEQ ID NO: 1, SEQ ID NO: 2, SEQ ID NO: 3, SEQ ID NO: 4, SEQ ID NO:5, SEQ ID NO: 6, SEQ ID NO: 7, SEQ ID NO: 8, SEQ ID NO: 9, SEQ ID NO: 10, SEQ ID NO:11 and SEQ ID NO: 12, fragments thereof and complements thereof. Compositions of the disclosure also include sequences that are complements of, fragments of, and/or sequences comprising at least 90% nucleic acid sequence identity to the sequences of SEQ ID NO: 1, SEQ ID NO: 2, SEQ ID NO: 3, SEQ ID NO: 4, SEQ ID NO:5, SEQ ID NO: 6, SEQ ID NO: 7, SEQ ID NO: 8, SEQ ID NO: 9, SEQ ID NO: 10, SEQ ID NO:11 and SEQ ID NO: 12.

[0112] In some embodiments, isolated nucleic acid sequences of the disclosure may comprise nucleic acid molecules comprising at least a 40 nucleotide sequence SEQ ID NO: 1, SEQ ID NO: 2, SEQ ID NO: 3, SEQ ID NO: 4, SEQ ID NO:5, SEQ ID NO: 6, SEQ ID NO: 7, SEQ ID NO: 8, SEQ ID NO: 9, SEQ ID NO: 10, SEQ ID NO:11, SEQ ID NO: 12; at least a 30 nucleotide sequence of SEQ ID NO: 1, SEQ ID NO: 2, SEQ ID NO: 3, SEQ ID NO: 4, SEQ ID NO:5, SEQ ID NO: 6, SEQ ID NO: 7, SEQ ID NO: 8, SEQ ID NO: 9, SEQ ID NO: 10, SEQ ID NO:11, SEQ ID NO: 12; at least a 25 nucleotide sequence of SEQ ID NO: 1, SEQ ID NO: 2, SEQ ID NO: 3, SEQ ID NO: 4, SEQ ID NO:5, SEQ ID NO: 6, SEQ ID NO: 7, SEQ ID NO: 8, SEQ ID NO: 9, SEQ ID NO: 10, SEQ ID NO:11, SEQ ID NO: 12; at least a 20 nucleotide sequence of SEQ ID NO: 1, SEQ ID NO: 2, SEQ ID NO: 3, SEQ ID NO: 4, SEQ ID NO:5, SEQ ID NO: 6, SEQ ID NO: 7, SEQ ID NO: 8, SEQ ID NO: 9, SEQ ID NO: 10, SEQ ID NO:11, SEQ ID NO: 12; at least a 15 nucleotide sequence of SEQ ID NO: 1, SEQ ID NO: 2, SEQ ID NO: 3, SEQ ID NO: 4, SEQ ID NO:5, SEQ ID NO: 6, SEQ ID NO: 7, SEQ ID NO: 8, SEQ ID NO: 9, SEQ ID NO: 10, SEQ ID NO:11, SEQ ID NO: 12; at least a 10 nucleotide sequence of SEQ ID NO: 1, SEQ ID NO: 2, SEQ ID NO: 3, SEQ ID NO: 4, SEQ ID NO:5, SEQ ID NO: 6, SEQ ID NO: 7, SEQ ID NO: 8, SEQ ID NO: 9, SEQ ID NO: 10, SEQ ID NO:11, SEQ ID NO: 12; any intermediate number of contiguous sequences from at least about 10 nucleotides of sequence to at least about 25 nucleotides of sequence of SEQ ID NO: 1, SEQ ID NO: 2, SEQ ID NO: 3, SEQ ID NO: 4, SEQ ID NO:5, SEQ ID NO: 6, SEQ ID NO: 7, SEQ ID NO: 8, SEQ ID NO: 9, SEQ ID NO: 10, SEQ ID NO:11, SEQ ID NO: 12 and sequences having 90% identity to the foregoing sequences.

[0113] Additional example compositions of the disclosure include isolated sequences described in SEQ ID NO:16-1278 that are uniquely found in a species of Cronobacter and not in another species of Cronobacter. These sequences may be described as species-specific target nucleic acid sequences. For example, SEQ ID NOs: 16-117 are found uniquely in C. sakazakii, SEQ ID NOs:118-204 are found uniquely in C. turicensis, SEQ ID NOs:205-273 are found uniquely in C. malonaticus, SEQ ID NOs:274-685 are found uniquely in C. muytjensii, SEQ ID NOs:686-820 are found uniquely in C. dublinensis, SEQ ID NOs:821-1213 are found uniquely in C. genomosp. 1 and SEQ ID NOs:1214-1278 are found uniquely in C. sakazakii ST4 strain, respectively. These include, in some exemplary embodiments, at least isolated nucleic acid sequences as listed in SEQ ID NO:16-1278, fragments thereof and complements thereof. Compositions of the disclosure also include sequences that are complements of, fragments of, and/or sequences comprising at least 90% nucleic acid sequence identity to the sequences set forth in SEQ ID NOs:16-1278.

[0114] In some embodiments, isolated nucleic acid sequences of the disclosure may comprise nucleic acid molecules comprising at least a 40 contiguous nucleotide sequence of SEQ ID NOs:16-1278; at least a 30 contiguous nucleotide sequence of SEQ ID NOs:16-1278; at least a 25 contiguous nucleotide sequence of SEQ ID NOs:16-1278; at least a 20 contiguous nucleotide sequence of SEQ ID NOs:16-1278; at least a 15 contiguous nucleotide sequence of SEQ ID NOs:16-1278; at least a 10 contiguous nucleotide sequence of SEQ ID NOs:16-1278; and/or any intermediate number of contiguous nucleotide sequences from at least about 10 nucleotides to at least about 25 nucleotides of a sequence of SEQ ID NOs:16-1278 and/or sequences having 90% identity to the foregoing sequences.

[0115] The present disclosure also provides in some embodiments compositions comprising primer and/or probe sequences that may be used for detection, identification, quantitation and/or differential detection of a Cronobacter spp. organism. Probes and/or primers generally comprise, but are not limited to, oligonucleotide sequence having from about 10 to about 40 nucleotides. Probe and primer sequences of the disclosure are probes and primers designed to hybridize to a signature sequence, such as a Cronobacter specific signature sequence such as SEQ ID NOs: 1-12 and such as to a Cronobacter species specific signature sequence such as SEQ ID NOs: 16-1278. Exemplary probe and/or primer compositions of the disclosure include, but are not limited to, an isolated nucleic acid molecules having nucleic acid sequences comprised in SEQ ID NO: 13, SEQ ID NO: 14, SEQ ID NO: 15, and/or nucleic acid sequences having at least 90% sequence identity to nucleic acid sequences comprised in SEQ ID NO: 13, SEQ ID NO: 14, SEQ ID NO: 15.

[0116] In some embodiments, exemplary probe and/or primer sequences set forth above comprising or derived from SEQ ID NO: 13, SEQ ID NO: 14, SEQ ID NO: 15 may also comprise a label or may be a derivative thereof. A label may include, but is not limited to, a dye, a radioactive isotope, a fluorescent label, a bioluminescent label, a chemiluminescent label, an enzyme. A dye in some embodiments may be a fluorescein dye, a rhodamine dye, a cyanine dye, such as but not limited to FAM™ dye, and/or a VIC® dye.

[0117] In some embodiments, probes and/or primers of the disclosure for detection, identification, quantitation and/or differential detection methods and/or steps that are described in sections below. These methods may comprise embodiments such as hybridization that utilize one or more probe sequences of the disclosure, such as, but not limited, to sequences comprising or derived from SEQ ID NO: 13, SEQ ID NO: 14, SEQ ID NO: 15; embodiments such as amplification (e.g., PCR) utilizing at least one primer pair of the disclosure, such as, but not limited, to sequences comprising or derived from SEQ ID NO: 13, SEQ ID NO: 14, SEQ ID NO: 15; embodiments such as multiplex amplification using multiple primer pairs, such as, but not limited, to sequences comprising or derived from SEQ ID NO: 13, SEQ ID NO: 14, SEQ ID NO: 15; embodiments such as quantitative detection (e.g., by real-time PCR) of amplified DNA using at least one probe and at least one primer pair.

[0118] Embodiments of the disclosure also relate to designing additional probe and/or primer sequences based on unique regions specific to and shared by the eleven strains of Cronobacter spp. described herein. Several programs and algorithms may be used to design primers and/or probes based on the nucleotide sequences specific to Cronobacter spp. that are disclosed in the present specification. Probe or primer compositions of the disclosure may be designed and synthesized by methods known in the art in light of the teachings of the present disclosure and the sequences described herein. In some embodiments, a probe or a primer may comprise a sequence having as few as 10 nucleic acids, at least 15, at least 20 and at least about 25 nucleotides in length to at least about 40 nucleotides in length may be used.

[0119] Recombinant constructs comprising a sequence of the disclosure, including for example a signature sequence, a probe and/or a primer sequence of the disclosure.

[0120] Some embodiments describe methods for detection and identification of one or more unique sequences in a target nucleic acid extracted from or present in a sample suspected of containing an Enterobacter to identify the microorganism as Cronobacter spp. Cronobacter spp. specific and unique sequences may be identified alone or in any combination in order to identify or determine the presence of Cronobacter spp. Exemplary sequences that are unique to Cronobacter spp. are described herein as SEQ ID NO: 1, SEQ ID NO: 2, SEQ ID NO: 3, SEQ ID NO: 4, SEQ ID NO:5, SEQ ID NO: 6, SEQ ID NO: 7, SEQ ID NO: 8, SEQ ID NO: 9, SEQ ID NO: 10, SEQ ID NO:11 and SEQ ID NO: 12.

[0121] Methods of the disclosure may be used for diagnostic detection and testing methods (such as for food safety testing, infant formula safety testing, baby food testing, diagnostic patient testing in people or animals that are infected with Cronobacter) and are useful to prevent and protect against Cronobacter spp. based human/animal infections.

[0122] In some embodiments, methods for detection of Cronobacter spp. may comprise detecting in a sample at least one (or more) of a nucleic acid sequence selected from the group consisting of SEQ ID NO: 1, SEQ ID NO: 2, SEQ ID NO: 3, SEQ ID NO: 4, SEQ ID NO:5, SEQ ID NO: 6, SEQ ID NO: 7, SEQ ID NO: 8, SEQ ID NO: 9, SEQ ID NO: 10, SEQ ID NO:11, SEQ ID NO: 12, fragments thereof, and complements thereof, wherein detection of one of the at least one nucleic acid sequences identifies Cronobacter spp. Methods may also employ sequences that have at least 90% nucleic acid sequence identity to these sequences.

[0123] An exemplary testing method may comprise: preparing a sample which may comprise: a) processing a sample to extract any genetic material contained in the sample and to render the genetic material amenable to detection steps (e.g., isolating nucleic acid from a sample); b) providing a composition of the disclosure comprising at least one isolated nucleotide sequence of an Cronobacter spp.-specific nucleotide sequence (such as but not limited to at least one nucleic acid sequence having the sequence of SEQ ID NO: 1, SEQ ID NO: 2, SEQ ID NO: 3, SEQ ID NO: 4, SEQ ID NO:5, SEQ ID NO: 6, SEQ ID NO: 7, SEQ ID NO: 8, SEQ ID NO: 9, SEQ ID NO: 10, SEQ ID NO:11, SEQ ID NO: 12, a fragment of the foregoing nucleic acids (also referred to as fragments thereof), a nucleic acid having from at least 10 to at least 25 nucleotides of contiguous sequences of the foregoing sequences, complements thereof and/or sequences comprising at least 90% nucleic acid sequence identity thereof); c) contacting at least one Cronobacter spp.-specific isolated nucleotide sequence with the sample (processed sample); and d) detecting hybridization of the at least one Cronobacter spp.-specific nucleotide sequence to a complementary nucleotide sequence in the sample. Detecting one or more nucleotide sequences that are unique to Cronobacter spp. are indicative that the test sample contains Cronobacter spp. Embodiments of the disclosure also describe quantitative assays by which one of skill in the art, in light of this disclosure, may quantify the amount of Cronobacter spp. in the sample.

detecting the species of Cronobacter comprising:

[0124] A method of the disclosure may comprise detecting a species-specific target nucleic acid sequence comprising detecting the presence of at least one nucleic acid selected from SEQ ID NOs:16-1278, wherein the detection of a nucleic acid having SEQ ID NO: 16-117 is indicative of the presence of C. sakazakii, the detection of a nucleic acid having SEQ ID NOs:118-204 is indicative of the presence of C. turicensis, the detection of a nucleic acid having SEQ ID NOs:205-273 is indicative of the presence of C. malonaticus; the detection of a nucleic acid having SEQ ID NOs:274-685 is indicative of the presence of C. muytjensii, the detection of a nucleic acid having SEQ ID NOs:686-820 is indicative of the presence of C. dublinensis; the detection of a nucleic acid having SEQ ID NOs:821-1213 is indicative of the presence of C. genomosp. 1; and the detection of a nucleic acid having SEQ ID NOs:1214-1278 is indicative of the presence of C. sakazakii ST4 strain.

[0125] In some embodiments, a nucleic acid may be isolated from a sample prior to practicing a method of the disclosure by isolating nucleic acids by methods known in the art to isolate nucleic acids from samples. Samples of various kinds as described in sections above may be amenable to the methods. In some embodiments, methods of the disclosure may comprise testing a food sample for contamination by Cronobacter spp. and may comprise isolating nucleic acid from a food sample having a selectively enriched food matrix.

[0126] Detecting the at least one nucleic acid sequence from a sample may be performed by one or more technologies, such as, but not limited to, nucleic acid amplification, hybridization, mass spectrometry, nanostring, microfluidics, chemiluminescence, enzyme technologies and combinations thereof. Some of these technologies are described in later sections of the specification.

[0127] In one embodiment, a method of the disclosure for specifically detecting Cronobacter spp. may comprise identifying at least a first unique region specific to Cronobacter spp. referred to as a “first target nucleic acid sequence” for detection, obtaining or designing one or more primer pairs (polynucleotides) each primer pair comprising a “first primer” operable to hybridize to a first sequence within the first target nucleic acid sequence and at least a “second primer” operable to hybridize to a second sequence within the first target nucleic acid sequence; hybridizing at least a first pair to the first target nucleic acid sequence; amplifying the first target nucleic acid sequence to form a first amplified target nucleic acid sequence product; and detecting the at least first amplified target nucleic acid sequence product, wherein detection of the at least first amplified target nucleic acid sequence product is indicative of the presence of Cronobacter spp. In some embodiments, the method is also indicative of the absence of Enterobacter in the sample and/or the absence of non-Cronobacter spp. bacteria.

[0128] In some embodiments, a method as described above may further comprise: identifying at least a second target nucleic acid sequence specific to Cronobacter spp.; hybridizing a second pair of polynucleotide primers to the second target nucleic acid sequence; amplifying the second target nucleic acid sequence to form a second amplified target nucleic acid sequence product; and detecting the second amplified target nucleic acid sequence product, wherein detection of the second amplified target nucleic acid sequence product is indicative of the presence of Cronobacter spp. In some embodiments, the detection of the first and second amplified target nucleic acid sequence product indicates the presence of Cronobacter spp. Multiple targets nucleic acids may be amplified and identified to increase the specificity of the assay if desired. In some examples multiple target detection can be performed simultaneously on a sample (such as by a multiplex PCR method), or sequentially on a sample, or by splitting a sample into parts and processing parts in parallel with different sets of probes and primers.

[0129] In some embodiments, a first target nucleic acid sequence specific to Cronobacter spp. and a second target nucleic acid sequence specific to Cronobacter spp. may comprise one or more sequences such as but not limited to: SEQ ID NO: 1, SEQ ID NO: 2, SEQ ID NO: 3, SEQ ID NO: 4, SEQ ID NO:5, SEQ ID NO: 6, SEQ ID NO: 7, SEQ ID NO: 8, SEQ ID NO: 9, SEQ ID NO: 10, SEQ ID NO:11, SEQ ID NO: 12, fragments thereof, at least 25 nucleotide sequences thereof, complements thereof and sequences comprising at least 90% nucleic acid sequence identity thereof.

[0130] The first primer pair and the second primer pair of the methods, in some embodiments, may be one or more of: SEQ ID NO:13, SEQ ID NO:14, SEQ ID NO:15, fragments thereof, at least 10 contiguous nucleotide sequences thereof complements thereof, and labeled derivatives thereof.

[0131] In some embodiments, detection of an amplified target nucleic acid sequence product (such as a first amplified target nucleic acid sequence product and/or a second amplified target nucleic acid sequence product) as set forth in the embodiment methods described above may comprise use of a probe. Exemplary probes may comprise but are not limited to one or more sequences such as SEQ ID NO:13, SEQ ID NO:14, SEQ ID NO:15, fragments thereof, at least 10 contiguous nucleotide sequences thereof complements thereof, and labeled derivatives thereof.

[0132] Labeled probes and/or primers are helpful in detection and quantitation methods. Label for primers and probes may comprise at least one of the following: a dye, a radioactive isotope, a chemiluminescent label, a fluorescent label, a bioluminescent label, and an enzyme. Dye's may comprises a fluorescein dye, a rhodamine dye, and/or a cyanine dye. Some probes and primers may be dually labeled. Non-limiting examples of nucleic acid dyes include ethidium bromide, DAPI, Hoechst derivatives including without limitation Hoechst 33258 and Hoechst 33342, intercalators comprising a lanthanide chelate (for example but not limited to a nalthalene diimide derivative carrying two fluorescent tetradentate β-diketone-Eu³⁺ chelates (NDI-(BHHCT-Eu³⁺)₂), (See, e.g., Nojima et al., Nucl. Acids Res. Supplement No. 1, 105-06 (2001)), ethidium bromide, and certain unsymmetrical cyanine dyes such as SYBR® Green, PicoGreen®, and BOXTO dyes. SYBR Green dye is an “intercalating dye” which, as used herein, refers to a fluorescent molecule that is specific for a double-stranded polynucleotide or that at least shows a substantially greater fluorescent enhancement when associated with a double-stranded polynucleotide than with a single-stranded polynucleotide. Typically nucleic acid dye molecules associate with double-stranded segments of polynucleotides by intercalating between the base pairs of the double-stranded segment, by binding in the major or minor grooves of the double-stranded segment, or both.

[0133] Various embodiments of the present teachings relate to a multi-primer assay for detecting Cronobacter spp. in a sample. Methods of the disclosure, in some embodiments, comprise amplification methods that yield one or more amplification products. In some embodiments an amplification product may be detected by a real-time assay. A real-time assay may be, but is not limited to a SYBR® Green dye assay or a TaqMan® assay.

[0134] In embodiments of methods where more than one (e.g., two) amplification products may be formed, detection of a first amplification product may entail the use of a first probe and detection of a second amplification product may entail the use of a second probe. In such embodiments, a first probe may have a first label and a second probe may comprise a second label. In one example embodiment, a first probe may be labeled with a FAM™ dye and a second probe may be labeled with VIC® dye. In some embodiments, hybridizing and amplifying with a first pair of polynucleotide primers may be carried out in a first vessel and hybridizing and amplifying with a second pair of polynucleotide primers may be carried in a second vessel. In some embodiments, hybridizing and amplifying with a first pair of polynucleotide primers and hybridizing and amplifying with a second pair of polynucleotide primers may be carried out in a single vessel. In some embodiments, detection of amplified products may be by a real-time assay such as a SYBR® Green dye assay or a TaqMan® assay.

[0135] In some embodiments, the present disclosure describes methods based on utilizing whole-genome sequencing of a bacterium(s) and/or bacterial strain(s) of interest (e.g., unknown strains of Cronobacter spp.) and comparison to other known bacterial organisms (e.g., two known strains of Cronobacter spp.) to identifying the bacterium of interest.

[0136] For example, some embodiments of the disclosure describe assays to distinguish Cronobacter spp. from Enterobacter. Enterobacter is a known pathogen that is highly similar at the nucleotide level to the Cronobacter spp. serotype. Tests to detect Enterobacter often cross detect Cronobacter spp., thereby picking up false positives. The present disclosure provides nucleotide sequence information that may be used to design specific tests for the distinct detection of Enterobacter that does not cross-detect Cronobacter spp. For example, in some embodiments, using the genome sequence of Cronobacter spp. as described herein and the genomic sequence of Enterobacter, primers and probes may be designed that detect sequences unique to Enterobacter that are not present in Cronobacter spp.

[0137] In some embodiments, the present disclosure describes methods to selectively detect a particular species of Cronobacter spp. The present disclosure provides nucleotide sequence information that is unique to each of the six species of Cronobacter spp. The unique nucleotide fragments are listed SEQ ID NOs:16-1278. The detection of a particular species can be carried as described in the preceding discussion. Primers and probes may be designed using the unique species specific sequences to detect a particular Cronobacter species present in a given sample using the methods described above.

[0138] In other embodiments, a specific testing method may comprise: testing a sample that has been detected to be positive for Enterobacter comprising: a) providing an isolated nucleotide sequence of an Cronobacter spp.-specific nucleotide sequence such as but not limited to at least one nucleic acid sequence having the sequence of SEQ ID NO: 1, SEQ ID NO: 2, SEQ ID NO: 3, SEQ ID NO: 4, SEQ ID NO:5, SEQ ID NO: 6, SEQ ID NO: 7, SEQ ID NO: 8, SEQ ID NO: 9, SEQ ID NO: 10, SEQ ID NO:11, SEQ ID NO: 12, a fragment of the foregoing nucleic acids (also referred to as fragments thereof), a nucleic acid having at least 25 nucleotides of contiguous sequences of the foregoing sequences, complements thereof and/or sequences comprising at least 90% nucleic acid sequence identity thereof; b) contacting the at least one Cronobacter spp.-specific isolated nucleotide sequence with the sample; and c) detecting hybridization of the at least one Cronobacter spp. specific nucleotide sequence to a complementary nucleotide sequence in the sample. Detecting one or more nucleotide sequences that are unique to Cronobacter spp. are indicative that the test sample contains Cronobacter spp. Several exemplary detecting methods that may be used have been described in sections above. Embodiments of the disclosure also describe quantitative assays by which one of skill in the art, in light of this disclosure, may quantify the amount of Cronobacter spp. in the sample. This may be compared to the quantity of Enterobacter detected in the sample to determine whether the sample is devoid of Enterobacter or is contaminated with a combination of Enterobacter and Cronobacter spp.

[0139] In other embodiments, a specific testing method may comprise: testing a sample that has been detected to be positive for Cronobacter spp. to detect a particular species of Cronobacter comprising: a) providing an isolated nucleotide sequence of a particular species of Cronobacter spp.-specific nucleotide sequence such as but not limited to at least one nucleic acid sequence having the sequence described in SEQ ID NOs:16-1278, a fragment of the foregoing nucleic acids (also referred to as fragments thereof), a nucleic acid having at least 25 nucleotides of contiguous sequences of the foregoing sequences, complements thereof and/or sequences comprising at least 90% nucleic acid sequence identity thereof; b) contacting the at least one Cronobacter spp. species-specific isolated nucleotide sequence with the sample; and c) detecting hybridization of the at least one Cronobacter spp. species specific nucleotide sequence to a complementary nucleotide sequence in the sample. Detecting one or more nucleotide sequences that are unique to that particular species of Cronobacter spp. are indicative that the test sample contains the particular species of Cronobacter spp. For example detecting at least one or more nucleic acid having nucleic acids described in SEQ ID NOs:16-117 is indicative that the test sample is contaminated with C. sakazakii; detecting at least one or more nucleic acids having nucleic acid sequences described in SEQ ID NOs: 118-204 is indicative that the sample is contaminated with C. turicensis; detecting at least one or more nucleic acid having nucleic acids described in SEQ ID NOs:205-273 is indicative that the test sample is contaminated with C. malonaticus; detecting at least one or more nucleic acid having nucleic acids described in SEQ ID NOs:274-685 is indicative that the test sample is contaminated with C. muytjensii; detecting at least one or more nucleic acid having nucleic acids described in SEQ ID NO: 686-820 is indicative that the test sample is contaminated with C. genomosp1; detecting at least one or more nucleic acid having nucleic acids described in SEQ ID NO: 821-1213 is indicative that the test sample is contaminated with C. dublinensis; detecting at least one or more nucleic acid having nucleic acids described in SEQ ID NO: 1214-1278 is indicative that the test sample is contaminated with C. sakazakii ST4 strain. Several exemplary detecting methods that may be used have been described in sections above. Embodiments of the disclosure also describe quantitative assays by which one of skill in the art, in light of this disclosure, may quantify the amount of the particular species Cronobacter spp. in the sample. This may be compared to the quantity of Cronobacter spp. detected in the sample to determine whether the sample is devoid of other species of Cronobacter or is contaminated with a combination of different species of Cronobacter spp.

[0140] In some embodiments, methods for distinguishing a bacteria from an Cronobacter spp. are described and may comprise analyzing the genome of the bacteria for the presence of a sequence selected from the group consisting of SEQ ID NO: 1, SEQ ID NO: 2, SEQ ID NO: 3, SEQ ID NO: 4, SEQ ID NO:5, SEQ ID NO: 6, SEQ ID NO: 7, SEQ ID NO: 8, SEQ ID NO: 9, SEQ ID NO: 10, SEQ ID NO:11, SEQ ID NO: 12, fragments thereof, at least 25 nucleotide sequences thereof and sequences comprising at least 90% nucleic acid sequence identity thereof. Such methods may be used to distinguish the presence of Cronobacter spp. from a bacterium of several species. For example, methods of the disclosure may be used to distinguish the presence of Cronobacter spp. from other Enterobacter. Methods of the disclosure may also be used to distinguish the presence of Cronobacter spp. from other bacteria and Enterobacter.

[0141] Methods of the disclosure may further comprise preparing a test sample for amplification prior to hybridizing and/or amplification and may include steps such as but not limited to (1) bacterial enrichment, (2) separation of bacterial cells from other components of the sample, (3) lysis of bacterial cells, and (4) nucleic acid extraction.

[0142] In various embodiments, a variety of methods for amplifying nucleic acid sequences may be employed. Amplification may be mediated by polymerase chain reaction, having at least a first pair of polynucleotide primers and in some embodiments at least a second pair of polynucleotide primers. Amplification methods include, but are not limited to, polymerase chain reaction (PCR), RT-PCR, asynchronous PCR (A-PCR), and asymmetric PCR (AM-PCR), strand displacement amplification (SDA), multiple displacement amplification (MDA), nucleic acid strand-based amplification (NASBA), and/or rolling circle amplification (RCA), transcription-mediated amplification (TMA). (See, e.g., PCR Technology: Principles and Applications for DNA Amplification (ed. H. A. Erlich, Freeman Press, NY, N.Y., 1992); PCR Protocols: A Guide to Methods and Applications (eds. Innis, et al., Academic Press, San Diego, Calif., 1990); Mattila et al., Nucleic Acids Res. 19, 4967 (1991); Eckert et al., PCR Methods and Applications 1, 17 (1991); PCR (eds. McPherson et al., IRL Press, Oxford); and U.S. Pat. Nos. 4,683,202, 4,683,195, 4,800,159 4,965,188 and 5,333,675 each of which is incorporated herein by reference in their entirety).

[0143] Nucleic acid amplification techniques are traditionally classified according to the temperature requirements of the amplification process. Isothermal amplifications are conducted at a constant temperature, in contrast to amplifications that require cycling between high and low temperatures. Examples of isothermal amplification techniques are: Strand Displacement Amplification (SDA; Walker et al., 1992, Proc. Natl. Acad. Sci. USA 89:392 396; Walker et al., 1992, Nuc. Acids. Res. 20:1691 1696; and EP 0 497 272, all of which are incorporated herein by reference), self-sustained sequence replication (3SR; Guatelli et al., 1990, Proc. Natl. Acad. Sci. USA 87:1874 1878), the Qβ replicase system (Lizardi et al., 1988, BioTechnology 6:1197 1202), and the techniques disclosed in WO 90/10064 and WO 91/03573.

[0144] Examples of techniques that require temperature cycling are: polymerase chain reaction (PCR; Saiki et al., 1985, Science 230:1350 1354), ligase chain reaction (LCR; Wu et al., 1989, Genomics 4:560 569; Barringer et al., 1990, Gene 89:117 122; Barany, 1991, Proc. Natl. Acad. Sci. USA 88:189 193), transcription-based amplification (Kwoh et al., 1989, Proc. Natl. Acad. Sci. USA 86:1173 1177) and restriction amplification (U.S. Pat. No. 5,102,784), and self-sustained sequence replication (Guatelli et al., Proc. Nat. Acad. Sci. USA, 87, 1874 (1990)) and nucleic acid based sequence amplification (NABSA). (See, U.S. Pat. Nos. 5,409,818, 5,554517 and 6,063,603). The latter two amplification methods include isothermal reactions based on isothermal transcription, which produce both single-stranded RNA (ssRNA) and double-stranded DNA (dsDNA) as the amplification products in a ratio of about 30 or 100 to 1, respectively.

[0145] Other exemplary techniques include Nucleic Acid Sequence-Based Amplification (“NASBA”; see U.S. Pat. No. 5,130,238), and Rolling Circle Amplification (see Lizardi et al., Nat Genet. 19:225 232 (1998)). Amplification primers comprising nucleic acid sequences unique to Cronobacter spp. and/or designed based on these unique Cronobacter spp. sequences of the present disclosure may be used to carry out, for example, but not limited to, PCR, SDA or tSDA.

[0146] PCR is an extremely powerful technique for amplifying specific polynucleotide sequences, including genomic DNA, single-stranded cDNA, and mRNA among others. Various methods of conducting PCR amplification and primer design and construction for PCR amplification using sequences disclosed in this specification are described in the present disclosure. Generally, in PCR a double-stranded DNA to be amplified is denatured by heating the sample. New DNA synthesis is then primed by hybridizing primers to one or more target sequence(s) in the presence of DNA polymerase and excess dNTPs. In subsequent cycles, the primers hybridize to the newly synthesized DNA to produce discreet products comprising the primer sequences at either end. These amplified products accumulate exponentially with each successive round of amplification. The DNA polymerase used in PCR is often a thermostable polymerase. This allows the enzyme to continue functioning after repeated cycles of heating necessary to denature the double-stranded DNA for allowing primer annealing. Polymerases that are useful for PCR include, but are not limited to, Taq DNA polymerase, Tth DNA polymerase, Tfl DNA polymerase, Tma DNA polymerase, Tli DNA polymerase, and Pfu DNA polymerase. There are many commercially available modified forms of these enzymes including: AmpliTaq® and AmpliTaq Gold® both available from Applied Biosystems. Many are available with or without a 3′ to 5′ proofreading exonuclease activity. See, for example, Vent® and Vent®. (exo-) available from New England Biolabs.

[0147] Amplified products may be detected using probes or labeled primers. Since primers are incorporated into the ends of an amplicon, in some embodiments, labeled probes that are complementary to the primer sequences may be used. Alternatively labeled probes may be used for detection. Several other methods for the detection of an amplified product (e.g., PCR amplification product) include, but are not limited to, gel electrophoresis, capillary electrophoresis, and are known to one of skill in the art and may be applicable in light of the teachings of the present disclosure.

[0148] The disclosure also describes kits for the detection of Cronobacter spp. A kit of the disclosure may comprise at least one pair of amplification primers (e.g., PCR primers) that may be designed or derived from nucleic acid sequences of SEQ ID NO: 1, SEQ ID NO: 2, SEQ ID NO: 3, SEQ ID NO: 4, SEQ ID NO:5, SEQ ID NO: 6, SEQ ID NO: 7, SEQ ID NO: 8, SEQ ID NO: 9, SEQ ID NO: 10, SEQ ID NO:11, SEQ ID NO: 12, fragments thereof, complementary sequences thereof, sequences comprising at least 90% nucleic acid sequence identity thereof and complementary sequences comprising at least 90% nucleic acid sequence identity thereof. In some embodiments, the primers of a kit may be labeled. A kit comprising two (or more) pairs of primers may have primer pairs labeled with at least two (or more) different labels that may be detectable separately. A kit may further comprise at least one probe designed and/or derived from nucleic acid sequences comprising SEQ ID NO: 1, SEQ ID NO: 2, SEQ ID NO: 3, SEQ ID NO: 4, SEQ ID NO:5, SEQ ID NO: 6, SEQ ID NO: 7, SEQ ID NO: 8, SEQ ID NO: 9, SEQ ID NO: 10, SEQ ID NO:11, SEQ ID NO: 12, fragments thereof, complementary sequences thereof, sequences comprising at least 90% nucleic acid sequence identity thereof and complementary sequences comprising at least 90% nucleic acid sequence identity thereof. Probes comprised in kits of the disclosure may be labeled. If a kit comprises multiple probes each probe may be labeled with a different label to allow detection of different products that may be the target of each different probe.

[0149] The disclosure also describes kits for the detection of particular species of Cronobacter from samples. For each species, the primers and probes are derived from the unique signature sequences of that species. For example, primers and probes designed to signature nucleic acids described in SEQ ID NOs:16-117 can be used in kits to detect and/or identify C. sakazakii; primers and probes designed to signature nucleic acids described in SEQ ID NOs: 118-204 can be used in kits to detect and/or identify C. turicensis; primers and probes designed to signature nucleic acids described in SEQ ID NOs:205-273 can be used in kits to detect and/or identify C. malonaticus; primers and probes designed to signature nucleic acids described in SEQ ID NOs:274-685 can be used in kits to detect and/or identify C. muytjensii; primers and probes designed to signature nucleic acids described in SEQ ID NO: 686-820 can be used in kits to detect and/or identify C. genomosp1; primers and probes designed to signature nucleic acids described in SEQ ID NO: 821-1213 can be used in kits to detect and/or identify C. dublinensis; primers and probes designed to signature nucleic acids described in SEQ ID NO: 1214-1278 can be used in kits to detect and/or identify C. sakazakii ST4.

[0150] A kit of the disclosure may comprise at least one pair of amplification primers (e.g., PCR primers) that may be designed or derived from nucleic acid sequences listed in SEQ ID NOs: 1-12 and/or SEQ ID NOs:16-1278, fragments thereof, complementary sequences thereof, sequences comprising at least 90% nucleic acid sequence identity thereof and complementary sequences comprising at least 90% nucleic acid sequence identity thereof. In some embodiments, the primers of a kit may be labeled. A kit comprising two (or more) pairs of primers may have primer pairs labeled with at least two (or more) different labels that may be detectable separately. A kit may further comprise at least one probe designed and/or derived from nucleic acid sequences of SEQ ID NOs: 1-12 and/or SEQ ID NOs:16-1278, fragments thereof, complementary sequences thereof, sequences comprising at least 90% nucleic acid sequence identity thereof and complementary sequences comprising at least 90% nucleic acid sequence identity thereof. Probes comprised in kits of the disclosure may be labeled. If a kit comprises multiple probes each probe may be labeled with a different label to allow detection of different products that may be the target of each different probe.

[0151] In some embodiments, a kit for the detection of Cronobacter spp. may comprise: at least one pair of amplification primers (e.g., PCR primers) and/or at least one probe designed and/or derived from nucleic acid sequences comprising SEQ ID NO:13, SEQ ID NO:14, SEQ ID NO:15, fragments comprising at least 10 contiguous nucleotide sequences thereof and complements thereof. In some embodiments, kit primers may be labeled. A kit comprising multiple pairs of primers may have primer pairs each labeled with different labels that may be detectable separately. Probes comprised in kits of the disclosure may be labeled. If a kit comprises multiple probes each probe may be labeled with a different label to allow detection of different products that may be the target of each different probe.

[0152] A kit of the disclosure may further comprise one or more components such as but not limited to: at least one enzyme, dNTPs, at least one buffer, at least one salt, at least one control nucleic acid sample, loading solution for preparation of the amplified material for electrophoresis, genomic DNA as a template control, a size marker to insure that materials migrate as anticipated in a separation medium, and an instruction protocol and manual to educate a user and limit error in use. It is within the scope of these teachings to provide test kits for use in manual applications or test kits for use with automated sample preparation, reaction set-up, detectors or analyzers. In some embodiments, a kit amplification product may be further analyzed by methods such as but not limited to electrophoresis, hybridization, mass spectrometry, nanostring, microfluidics, chemiluminescence and/or enzyme technologies.

[0153] Components of kits may be individually and in various combinations comprised in one or a plurality of suitable container means.

[0154] In certain embodiments, the present disclosure describes a computer program product which includes a tangible computer-readable storage medium whose contents include a program with instructions being executed on a processor so as to perform a method for PCR data analysis. PCR data obtained for any PCR method such as but not limited to detecting the presence of a pathogen in a sample, detecting or diagnosing a pathogen and its cause, quantifying the amount of a pathogen contaminant in a sample may be analyzed by the present methods. A computer method for PCR data analysis of the disclosure can be performed by a system comprising one or more software modules. In some embodiments, the present disclosure describes methods for standardization of real-time analysis during a polymerase chain reaction (PCR). In some embodiments the present disclosure describes computer software algorithms and computer software based methods for standardizing analysis of data obtained during PCR and real-time PCR. Data as described in a method of the disclosure may be PCR data.

[0155] In some embodiments PCR data may be visualized in a two-dimensional plot of fluorescence intensity (y-axis) vs. cycle number α-axis). PCR data or a PCR data set may be transformed to produce a partition table of data points with one column including the fluorescence at cycle n, y(n), and a second column including the fluorescence at cycle (n+i), y(n+i), where i is typically 1 or greater. This 2-d plot is also referred to as an Amplification Plot.

[0156] There is an increasing need for better and more standardized analysis methods for analyzing real-time PCR data. Many inexperienced users are unsure how to set threshold values in order to obtain accurate Ct (cycle threshold) values. The term “Ct” represents the PCR “cycle” at which a signal first crosses above a fluorescence threshold which is set at a level above background noise. This “cycle” is not necessarily an integral number. Prior to this point the concentration of amplified product is considered too low to be of any significance. One of skill in the art will recognize that Ct is sometimes also known as Cq (quantification cycle) (See for example, Stephen Bustin et. al. “MIQE Guidelines: Minimum Information for Publication of Quantitative Real-Time PCR Experiments,” Clinical Chemistry 55:4; pages 611-622 (2009)). Inconsistent guidelines to set threshold values lead to large amount of variation between labs making PCR data comparison difficult. In some embodiments the present disclosure describes computer software algorithms and computer software based methods for standardizing analysis of data obtained during real-time PCR (PCR data).

[0157] In some embodiments, a software method and/or a computer based method and/or a computer implemented method of the disclosure is called a control-based threshold (CBT) method which is a method whereby a user uses a pre-defined percentage of a positive controls maximum plateau value (dRN) to set a threshold. Rn (normalized reporter) is the fluorescence emission intensity of a reporter dye divided by the fluorescence emission intensity of a passive reference dye. In some non-limiting example embodiments, ROX (6-Carboxyl-X-Rhodamine) may be used as a passive reference dye. The dRN (delta Rn) is the magnitude of the fluorescence signal generated during a PCR at each time point. A dRN value is determined by the formula:

dRN=Rn−(Baseline or Background)

[0158] In some embodiments, the disclosure describes a threshold setting method for analysis of PCR data. Threshold is described as the line whose intersection with the Amplification plot defines the Ct Improper threshold settings can lead to incorrect data interpretation and diminished reproducibility if set too low. A method of threshold setting may comprise setting an “optimal threshold setting” wherein an optional threshold setting should provide optimal sensitivity and specificity for a PCR assay.

[0159] Threshold setting methods generally comprise an Auto Ct method which typically uses a software algorithm to determine a threshold based on local signal characteristics or may comprise an Absolute Threshold method wherein a user chooses a single, absolute value to use for the threshold setting for all runs. A control-based threshold setting method, as described in the present disclosure, is based on a pre-defined percentage of a positive control plateau value. For example, a pre-defined percentage of a positive control's maximum plateau value (called dRN) may be determined at cycle 40 of a PCR reaction by a PCR instrument. This pre-defined percentage of dRN calculation may be entered by a user to set a threshold. A baseline may be set according to user instructions.

[0160] However, one of skill in the art in view of the present teachings will know that a positive control's maximum plateau value (dRN) may be determined at any cycle other than cycle 40 as well. For example, 40 cycles may be used by a user if the PCR reactions are run for a total of 40 PCR cycles. Accordingly, dRN may be calculated at the last cycle number that a PCR reaction is run for, such as but not limited to 40, 45, 50, or any other cycle number. Alternatively, dRN may be calculated as the average or median value of cycles near or at the end of the PCR reaction.

[0161] A control based threshold setting method of the present disclosure, according to some embodiments, may provide one or more advantages outlined below such as but not limited to:

[0162] increased consistency between real-time runs, between labs, and between different users (e.g. technicians)

[0163] the percentage of the dRN value can be customized for each product (such as a microbial diagnostic product, i.e., detecting Cronobacter and/or for a veterinary diagnostic product)

[0164] it takes into account the effects of a large proportion of chemical and/or instrument interactions that may influence Ct values

[0165] is compatible with all assays

[0166] Accordingly, a CBT method of the disclosure provides a balance of high analytical sensitivity and consistent target nucleic acid amplification across multiple Real Time PCR assays.

[0167] A control based threshold method to obtain Ct values may comprise: executing a set of computer readable instructions by a computer system interfacing with a PCR instrument comprising: 1) computing Rn values by dividing fluorescence values gathered by the PCR instrument for the dye associated with the target nucleic acid by that for the passive reference dye; 2) calculating a regression line to Rn values gathered by the PCR instrument during early PCR cycles (for example, cycles 3 to 10); 3) subtracting the regression line (the baseline) from Rn values to yield dRN values for all samples at all cycles; 4) obtaining an average of software derived values for dRN at the final PCR cycle for all positive control samples; 5) calculating a pre-defined percentage of the average dRN value; and 6) using the pre-defined percentage of the average dRN value as a threshold (this is the CBT) to determine Ct values by finding the intersection between the CBT and the dRN curve using a suitable interpolation method (such as linear or spline interpolation).

[0168] In some embodiments, a computer-implemented method of the disclosure for determining a control based threshold (CBT), may comprise: executing a set of computer readable instructions by a computer system interfacing with a PCR instrument comprising: 1) receiving (e.g., importing or inputting) polymerase chain reaction (PCR) data is into a computer program; computing a dRn value using the PCR data; and computing a Ct (cycle threshold) value using an interpolation algorithm to determine the intersection between the dRn and the cycle number of the PCR reaction from where PCR data is obtained; using the computed Ct value as the control based threshold value for all PCR reactions.

[0169] A method for setting a control based threshold CBT may in some embodiments comprise: executing a set of computer readable instructions by a computer system interfacing with a PCR instrument comprising: 1) exporting a positive control's maximum plateau value (a dRN value) for positive control samples of a PCR reaction wherein the dRN value is an average of software derived values for each respective dRN at the final PCR cycle for all positive control replicates; 2) calculating a pre-defined percentage of the dRN value; and 3) using the pre-defined percentage of the average dRN value as a threshold (CBT), to determine a Ct (cycle threshold) value for all samples. In some embodiments a method may further comprise: receiving polymerase chain reaction (PCR) data is into a computer program; computing a dRn value using the PCR data; and computing a Ct value using an interpolation algorithm to determine the intersection between the CBT and the dRN data; and optionally comparing to Ct values of a negative control, a positive control, and/or an internal positive controls.

[0170] In some embodiments of the each dRN value is the magnitude of fluorescence signal generated during PCR by a positive control at the last PCR cycle number and is determined by the formula: dRN, Rn−(Baseline or Background), wherein, Rn is the fluorescence emission intensity of a reporter dye divided by the fluorescence emission intensity of a passive reference dye and Baseline or Background is a linear regression line fit to Rn data within a pre-determined range of PCR cycles.

[0171] In some embodiments, wherein a dRN value of a positive control used is the average or median across positive controls of the average or median dRN values over a pre-determined range of PCR cycles near the end of the PCR data.

[0172] In some embodiments wherein the Ct value derived from the CBT and dRN data is compared to two or more Ct value ranges where each range is associated with a biologically meaningful diagnosis such as positive, suspected positive, and negative outcomes.

[0173] In some embodiments wherein the Ct value derived from the CBT and dRN data of positive and negative controls is used to determine quality control status such as the presence of PCR inhibition.

[0174] In summary a CBT method of the disclosure provides: 1) complete, clear and concise instructions provided to a Real Time PCR user including instructions for one or more of the following non-limiting examples such as, a) baseline settings, b) threshold settings and/or c) end-user controls; 2) a consistent threshold methodology for a) between real time PCR runs, different laboratories and different users (different level of user knowledge); and is generally b) compatible with all assays and has c) no change in positive or negative calls between various users.

[0175] FIG. 2 is a schematic diagram of an algorithm 100 comprising one or more software modules that perform a method for PCR data analysis, in accordance with certain embodiments. As shown in FIG. 2, a CBT method algorithm 100 may start at step 1 comprising a start step, wherein data is entered or imported into a computer program through a PCR machine. In Step 2 of algorithm 100, data may be filtered, to filter out omitted wells, such as sample wells that do not have any samples or wells otherwise omitted from further analysis by the user. Step 3 may comprise computing the dRn value. Step 4 may comprise computing the baseline and using it to get dRN values. Step 5 may comprise computing the CBT from dRN values of Positive Control samples. Step 6 may comprise computing the Ct value by applying any suitable interpolation algorithm (e.g., linear or spline interpolation) to find the intersection between the CBT and the dRN values. Step 7 may comprise using the Ct values to call out positive (+) and negative (−) values associated with detection or non-detection of a PCR amplified nucleic acid which is described as “compute+/−.” Ct values that are small are “positives”; large values are “negatives” and in-between values are considered to be “suspected positives.”

[0176] In Step 8 Quality Control check may be performed by examining the Ct values of controls (negative controls, positive controls, internal positive controls, etc.) and signal characteristics (for e.g., low ROX values).

[0177] The program ends in Step 9 and data is outputted for an end user to view regarding detection or non-detection as well as in some embodiments quantitation of detected amplified product.

[0178] The present disclosure in some embodiments describes a collection of software modules that facilitate presence-absence based identification of data obtained by PCR methods. For example, a software method of the disclosure may be operable to analyze PCR data to enable an end user to know whether a microorganism is present or absent in a sample. In another example, an end user may know if a certain nucleic acid is present or absent in a sample.

[0179] In some embodiments a software module of the disclosure may also facilitate quantification of microbes or certain nucleic acids that may be present in a sample, thereby providing quantitative analysis modules. In some embodiments, quantification may be done in real-time.

[0180] In some embodiments, software modules of the disclosure facilitate quantification using TaqMan® probes and qPCR for diagnostic purposes. Accordingly, in some embodiments, computer program product (software and/or algorithm) of the present disclosure includes a tangible computer-readable storage medium whose contents include a program with instructions being executed on a processor so as to perform a method for PCR data analysis thereby enabling a user, who may not have detailed PCR or data analysis knowledge, to reach a conclusion regarding the PCR-based biological test being performed. In some non-limiting example embodiments, a PCR-based biological test may be carried out using a Cronobacter testing kit of the disclosure. One of skill in the art will recognize that the computer methods and software is not limited to testing Cronobacter and may be used with any other PCR based testing kit and/or PCR testing composition for testing for the presence and or absence of any microbial, fungal, viral, animal, plant, insect or human nucleic acid and thereby may be used for a variety of applications including but not limited to, food safety testing, medical diagnostic, environmental testing, animal diagnostic testing and other applications.

[0181] Algorithm 100 as shown in FIG. 2 may, in some embodiments, comprise a collection of software modules that facilitate analysis of data obtained by PCR methods. FIGS. 3A-D shows detailed schematic diagrams of various example algorithms and distinct software modules that may be comprised in algorithm 100.

[0182] Some definitions of terms used in depiction of FIGS. 3A to 3D are listed below:
[0183] PC: Positive Control, a sample that is known to contain the targeted genetic material
[0184] IPC: Internal Positive Control, a strand of DNA that is introduced into each sample's well. The reagents associated with the assays contain probes that target this strand of DNA.
[0185] NTC: No Template Control: a type of negative control. It is known to be devoid of any genetic material and is introduced to the assay workflow at the point of performing PCR.
[0186] NEC: Negative Extraction Control: a type of negative control. It is known to be devoid of the targeted genetic material and it is introduced to the assay workflow at the point of sample preparation.
[0187] Inhibition: The PCR reaction could not proceed as expected.
[0188] Null: The case where no Ct value is assigned. This may happen if, for example, the dRN data never intersects the Ct estimation threshold.
[0189] Ct estimation threshold: dRN level which is considered significantly above noise;
   [0190] the “cycle” at which dRN data first reaches this level defines the Ct value
[0191] Persistently Infected An example call category associated with very low Ct values.

[0192] An algorithm described in FIG. 3A is an algorithm for computing Ct; an algorithm for assessing if a sample is a positive or negative (+/−) is shown in FIG. 3B; an algorithm for determining inhibition criteria is shown in FIG. 3C and FIG. 3D shows an algorithm for Assigning QC flags. One of skill in the art, in light of this disclosure will recognize that the example algorithms shown in FIGS. 3A-3D are not limiting and additional/alternative algorithms may be comprised in algorithm 100. Algorithms shown in FIGS. 3A-3D shows methods of analysis in various workflows for detection of various types of PCR amplified products.

[0193] Software and algorithms of the disclosure may have one or more features described here. In some embodiments, a workflow may comprise software that adapts to a user is described. In some embodiments, a workflow of the disclosure adapts to a single-plate or multi-plate workflow based on how many data files a user imports into a software.

[0194] In some embodiments, a software method of the disclosure comprises defining assays within independent files that can be installed/uninstalled into/from the software application. This allows a validated software to continue support installed assays and support newly installed assays without needing to revalidate their entire computer system and assay installations that had already been validated.

[0195] In some embodiments, a software of the disclosure comprises modules for comparing amplification and/or multicomponent plots between an unknown sample and positive and negative controls and other samples when doing Quality Control to confirm or override calls made by the software.

[0196] In some embodiments, a software module of the present disclosure allows selection of a region of a plate by a simple key stroke or double clicking a pointing device associated with a computer. For plates like Open Array and TLDA cards, there are natural regions of wells. Users would be enabled to quickly select these regions of wells by double clicking on any of the constituent wells (single click->select well. Double click->select region of wells). Alternatively, the software can provide a zoom function to move between different resolutions of display. In each resolution a different sub-region of wells is represented by a single cell in the display. Any operations performed on a cell at a given resolution applies to all wells in the sub-region represented by that cell.

[0197] In some embodiments, a software module of the present disclosure allows direct editing of a cell with multiple attributes, by providing a selector to direct editing to one of the attributes when first entering a cell and, when within a cell, a simple method to navigate to other attributes (such as a carriage return).

[0198] In some embodiments, a software module of the present disclosure allows adding/removing custom attributes of a well within the software with the ability to manipulate them and assign values to them in the same manner as pre-existing attributes.

[0199] In some embodiments, a software module of the present disclosure allows a combined display of dRN and the un-altered data underlying dRN values (fluorescence values for each dye).

[0200] In some embodiments, a software module of the present disclosure collects together problem cases for quick navigation to the data underlying these samples. This facilitates the process of reviewing and annotating diagnostics results.

[0201] In some embodiments, a software module of the present disclosure allows for combining plates of data to analyze together as a unit, an analysis unit.

[0202] In some embodiments, a software module of the present disclosure allows applying controls from one plate over all the plates in the analysis unit.

[0203] In some embodiments, a software module of the present disclosure allows multiple results for a sample to be pooled together and fed to an algorithm such as an artificial neural network or other pattern recognition algorithm, to produce a final diagnostic result (can be multi-functional: e.g., copy number variation results, single nucleotide polymorphisms, protein quantification results, mRNA quantification results (gene expression), etc.

[0204] In some embodiments, a software module of the present disclosure allows presenting diagnostic results on a plate grid (spreadsheet).

[0205] In some embodiments, a software module of the present disclosure allows gray region for diagnostics (suspect positive region or suspect negative region, as well as something between positive and negative diagnoses).

[0206] In some embodiments, a software module of the present disclosure allows analyzing well contents to identify possible inhibition of PCR by an interfering substance (using an positive control internal to the well).

[0207] In some embodiments, a software module of the present disclosure allows analyzing well contents to identify possible inhibition of PCR by competition for reagents (there is one or more strongly dominant target(s) in the well which causes other targets to appear negative because they failed to compete for the PCR resources).

[0208] In some embodiments, a software module of the present disclosure allows subdividing the Ct range into categories and associating these with an approximate but meaningful quantification unit relevant to a diagnosis; e.g., high is from Ct=1 to 10, medium is Ct from 11 to 28, low is Ct from 29 to infinity. The software module allows calibrating to these levels by using samples for which the diagnostic level is known.

[0209] While the principles of inventions disclosed herein have been described in connection with specific embodiments, it should be understood clearly that these descriptions are made only by way of example and are not intended to limit the scope of inventions described herein. The present disclosure is for the purposes of illustration and description. It is not intended to be exhaustive or to limit disclosed embodiments to the precise forms as described. In light of this disclosure, many modifications and variations will be apparent to a practitioner skilled in the art. What is disclosed was chosen and described in order to best explain the principles and practical application of the disclosed embodiments of the art described, thereby enabling others skilled in the art to understand various embodiments and various modifications that are suited to contemplated uses. It is intended that the scope of what is disclosed be defined by the following claims and their equivalence.

### EXAMPLES

[0210] Some embodiments of the present disclosure may be understood in connection with the following examples. However, one skilled in the art will readily appreciate the specific materials, compositions, and results described are merely illustrative of the disclosure, and are not intended to, nor should be construed to, limit the scope of the disclosure and its various embodiments.

### Example I. Strain Selection

[0211] Nine strains representing each of the six named species of Cronobacter spp. were selected. The selected strains include three C. sakazakii (strain 680, 696, 701), two C. malonaticus (681, 507), one C. muytjensii (530), one C. turicensis (564), one C. dublinensis (582), and one C. genomosp1 (581) strain. Among these, strain 701 is a C. sakazakii ST4 strain that has been strongly associated with neonatal meningitis (Joseph and Forsythe, 2011). The C. sakazakii BAA-894 strain sequence was used as a reference for the 696, 701, 680, 507 and 681 strain sequences, and the C. turicensis z3032 strain sequence was used as a reference for the 564, 582, 530 and 581 strain sequences, due to their availability as finished genome sequences in the public databases. Table 1 depicts the information on nine newly assembled Cronobacter genomes and two publicly available Cronobacter genomes.

TABLE 1

| | | | Genome | MLST | Refseq |
|---|---|---|---|---|---|
| | | | size | Sequence | Accession |
| Species | Strain | Source | (Mbp)^{b} | Type | Num |
| C. sakazakii | 696 | Clinical | 4.90 | 12 | |
| C. sakazakii | 701 | Clinical | 4.75 | 4^{c} | |
| C. sakazakii | 680 | Clinical | 4.35 | 8 | |
| C. sakazakii | BAA- | Powered | 4.53 | 1 | NC_009778- |
| | 894^{a} | formula | | | NC_009780 |
| C. | 507 | Clinical | 4.45 | 11 | |
| malonaticus | | | | | |
| C. | 681 | Clinical | 4.50 | 7 | |
| malonaticus | | | | | |
| C. turicensis | 564 | Clinical | 4.50 | 5 | |
| | | (blood) | | | |
| C. turicensis | Z3032^{a} | Clinical | 4.60 | 19 | NC_013282- |
| | | | | | NC_013285 |
| C. | 582 | Unknown | 4.68 | 36 | |
| dublinensis | | | | | |
| C. muytjensii | 530 | Infant | 4.53 | 49 | |
| | | formula | | | |
| C. | 581 | Environ- | 4.45 | 30 | |
| genomosp. 1 | | mental | | | |

^{a}Strains for which the complete genome sequence is publicly available.
^{b}Sizes of newly sequenced genomes were derived from the sum of the length of all contigs from the de novo assembly.
^{c}C. sakazakii ST4 is strongly associated with neonatal meningitis (Joseph and Forsythe, 2011).

[0212] Table 2 depicts de novo assembly statistics for the nine Cronobacter strains sequenced.

TABLE 2

| | | | N50 of | | | | Estimated |
|---|---|---|---|---|---|---|---|
| | | Total cont | scaffolds | Num of | N50 of | Num of | num of |
| Species | Strain | length (bp) | (bp) | scaffolds | contigs (bp) | contigs | ORFs (bp) |
| C. sakazakii | 696 | 4,897,138 | 297,746 | 920 | 4,336 | 2,659 | 4,190 |
| C. sakazakii | 701 | 4,752,729 | 346,235 | 1,171 | 3,538 | 3,148 | 3,955 |
| C. sakazakii | 680 | 4,350,201 | 75,779 | 2,308 | 2,007 | 4,994 | NA |
| C. malonaticus | 507 | 4,447,701 | 373,979 | 464 | 3,703 | 2,361 | 3,727 |
| C. malonaticus | 681 | 4,496,745 | 345,762 | 263 | 5,537 | 1,592 | 3,884 |
| C. turicensis | 564 | 4,500,608 | 411,105 | 263 | 4,796 | 1,807 | 3,820 |
| C. dublinensis | 582 | 4,677,592 | 229,230 | 539 | 3,822 | 2,657 | 3,964 |
| C. muytjensii | 530 | 4,533,101 | 596,924 | 444 | 4,925 | 1,937 | 3,877 |
| C. genomosp. 1 | 581 | 4,450,737 | 331,248 | 389 | 4,506 | 2,085 | 3,867 |

### Example II. SOLiD™ Sequencing

[0213] Long mate-paired genomic DNA libraries with approximately 1.8 kb inserts were constructed for each strain from the isolated strain genomic DNA, and 2×50 bp reads were obtained from each pair. Sequencing was carried out to 2×50 base pairs using SOLiD™ chemistry (Applied Biosystems) according to the manufacturer's instructions.

[0214] Over 23-36 million reads, of approximately 500-800 fold coverage of the genomes, were obtained for each strain. The colorspace reads were error-corrected and then assembled using the SOLiD bacterial de novo assembly pipeline, which employs the velvet assembly engine (Zerbino and Birney, 2008). The nine genomes (696, 701, 680, 681, 507, 530, 564, 581, 582) (Table 2) were successfully de novo assembled into contigs and scaffolds. The ultimate genome assemblies contain 1600-5000 contigs with N50 of 2.0-5.5 kb and 260-2300 scaffolds with N50 of 76-600 kb.

### Example III. Sequencing and Assembly of Nine Cronobacter Strain Genomes

[0215] In some embodiments, the genomic sequence of the nine Cronobacter genomes have been sequenced and specific and unique regions identified.

[0216] Genomic DNA was isolated using Qiagen DNeasy Blood & Tissue Kit following the instruction from the manufacturer (Qiagen, Valencia Calif.). The isolated genomic DNA was used to construct long mate-pair libraries, which were sequenced to 2×50 base pairs using SOLiD™ chemistry (Applied Biosystems), according to the manufacturer's instructions (Example II).

[0217] Over 23-36 million reads, of approximately 500-800 fold coverage of the genomes, were obtained for each strain. The colorspace reads were error-corrected and then assembled using the SOLiD bacterial de novo assembly pipeline, which employs the velvet assembly engine. The nine genomes were successfully de novo assembled into contigs and scaffolds. The ultimate genome assemblies contain 1600-5000 contigs with N50 of 2.0-5.5 kb and 260-2300 scaffolds with N50 of 76-600 kb (Example III).

[0218] The assembled genome scaffolds were aligned to the most closely related public complete genomes using MUMmer (Kurtz et al., 2004). The scaffolds of strains 696, 701, 680, 507 and 681 were aligned to the C. sakazakii BAA-894 complete genome, and the scaffolds of 564, 582, 530 and 581 were aligned to the C. turicensis z3032 complete genome. Scaffolds were broken at points where non-contiguous regions of the reference genome were juxtaposed, and then re-ordered so that they were syntenic with the reference genome. All scaffolds from a given strain were concatenated into a single pseudogenome, which was then annotated at the RAST automated annotation server (Aziz et al., 2008).

[0219] By aligning the contigs against the public complete Cronobacter genomes followed by annotation using RAST, draft genomes were generated of size 4.4-4.9 Mb containing 3,700-4,200 annotated genes (Table 2). Genome comparison revealed an overall high sequence identity (89-98%) between the Cronobacter species but also suggested various degrees of divergence.

[0220] In some embodiments sequences specific and unique to and shared by the eleven Cronobacter spp. strains can be used to identify Cronobacter spp. or distinguish Cronobacter spp. from all other Enterobacter genomes. One example method used to identify Cronobacter spp. specific sequences is outlined in Example IV.

[0221] Embodiments of the present disclosure have identified serotype specific and unique DNA sequences of Cronobacter spp. shared by the eleven strains (e.g., but not limited to, SEQ ID NO:1, SEQ ID NO:2, SEQ ID NO:3, SEQ ID NO:4 SEQ ID NO:5, SEQ ID NO:6, SEQ ID NO:7, SEQ ID NO:8, SEQ ID NO:9, SEQ ID NO: 10, SEQ ID NO: 11 and SEQ ID NO:12) which were utilized for an assay design (described in Example VI) and the subsequent detection of Cronobacter spp. by amplification (PCR), hybridization and other molecular biology techniques as known to one skilled in the art.

[0222] Twelve Cronobacter spp. specific sequences, covering a sum of 2,070 nucleotides were found using the analysis of Example IV. These sequences are shown in SEQ ID NO: 1-12.

[0223] In some embodiments, the sequences designated by SEQ ID NO:1, SEQ ID NO:2, SEQ ID NO:3, SEQ ID NO:4 SEQ ID NO:5, SEQ ID NO:6, SEQ ID NO:7, SEQ ID NO:8, SEQ ID NO:9, SEQ ID NO: 10, SEQ ID NO: 11 and SEQ ID NO:12, are signature sequences against which Cronobacter spp.-specific diagnostic assays have been designed in the present disclosure. No comparable sequences were found in the GenBank database (release 183.0). The coordinates of Cronobacter spp. specific sequences are provided in Table 3.

TABLE 3
Exemplary Sequences and Coordinates Described in Some
Embodiments with Corresponding SEQ ID NOS:

>fragment_523060-523208
TGGGAATGTGAGCTCTGGGGCAGTCGTGGCTCCTTCCACAGCACCTGTTGTTAGCACGCA
AGAACCGACCGTAAGCAGCACGACCAATAGCGCACCTGTCGCTACCTGGCGCTGGCCGA
CTGAAGGCAACGTTATCGAGAACTTCTCCG
(SEQ ID NO: 1)
>fragment_687438-687541
AATGAAGCCCATCGCCCGACCCGCGCTCAGGACGCTATCGACGTTAAACTGCGCGCTTAA
AAAAATAATACGCTTTTCCCGAATCAGGCCAGGAAGCTCCGGCA
(SEQ ID NO: 2)
>fragment_2113821-2113966
TCGTCCTGGGAGTTTTGATTGGCCATAAGGTGACATCTCGGGGAGGTTTAAGCAGTTACA
TTACCTGCATTATTCTAACAAAACATTAACAGTAACGCGTACACTTTTGGTCTAAACTTAG
CACTGAAAATGCAGCTGACAAGCAA
(SEQ ID NO: 3)
>fragment_2740245-2740349
TTCTCCATACGTTTGCATTTTCACTACGTGATTGAAGCGAAAACCATACCATTAAAGGCG
CTATGCCGACAACAAACGCGGCGGAGGGTAAATGGTTTCACCGGG
(SEQ ID NO: 4)
>fragment_2823697-2824144
GGCGTTGCTGTTTCCATGTGTATCAATCCTTTACCCTGAATAATTGTTGTTTTTTTGTTGCT
TTTATCGCCAGAAAAAAAGCACAACGAAGAAAGTGTTCCAATTTACTGGTCAATAAAATA
GCATCTGATTTGCTTAGATATATTTATCGAAATTTGGTAGCAGAGACTTTAAATAATTTCG
TTTATCATTCTGTGCGACATTATTTTTAACGATTCAGCACCGGGAATAATTATTTCCGCGC
CGTTATTGTTTCTCATTTGAAACCGCCTTGTTAATTTATTGTATGTTATTTTCTCCCCGATA
TACTCAATTCCCGTCTTGACCTTACTTTACATAGGATTTTGTTATAACCCTTGCCATGTGGC
TGTCATGGCTTACATTTTACATTTTGTTGCATTGGCTGTGACGGTAGCGACAGAACCCGGT
TACACCCCGCAGACAGTGC
(SEQ ID NO: 5)
>fragment_3031790-3031935
CCACGCGGCATGGGCCGTGGTTTTTGCTCGCTTTGGTCTGCACAGCATAAAAGAAAGTGG
TATTCTCGGGCTATTGCCCAGGCCCGTCTTGCGGCACATCACAACGATAACCCAGAGGCC
CGCACGCCGCGCTGCACCGGGCCCAG
(SEQ ID NO: 6)
>fragment_3043432-3043664
CTTATTTGCTGTGCGCATGAGTACACATTAAGCAATCTTAAGTTTTTAGTGGCTATTTTG
CCGGACGATCCCGCTTTAACCCAATATTATCGAGAAGTTAATGAGTTACGTGCAAAAAAT
CAAAAAACACTACCCTCAATTCTTAAAAATGAGCGCCAAATAAATCTTTACCTGCGATTA
GAAGACGATGATTTAATTGATAAAATTAATCCAGATCTTCGGTTGTCCACTCC
(SEQ ID NO: 7)
>fragment_3084403-3084556
GCATAAAAAAGCCGTGACAACCACGGCTCGCCCGACAGGCCAGGCTCACCCACCCGTATT
CAGGTGGCGCAGACTATATCACCGAAGCAGAGCGCTCACAAATAACCTCGCCTTCACCGT
ATGATTAATCATCAGCTTGCGAGACGCGTCACCC
(SEQ ID NO: 8)
>fragment_3115773-3115905
TTAAGCGAGGCGCAGCGCAAGGGGGTGGAAGTGCTGGCCTGGAAGGCCTCGCTCTCCGC
CAGTGAGATAACGCTGACGTCGCCTTTGCCGGTTCGCTTATAACCAGTTGATCCGCAATC
GACTAATAATGATA
(SEQ ID NO: 9)
>fragment_3284085-3284250
GCCAGCCACCGCCAGACGACCTGTCTGGATGTTCCCACAATCCTTCCTCATGTTAATTGA
CTGACCGGCAGCCTCATGCCGCCTGAAATTCTCAGATACTTCATGCTAACCAGGCGAAGG
CCGTTGCGCCATGTCGCGAACATTTTTTTACCATTCGCGCATTAAT
(SEQ ID NO: 10)
>fragment_3640902-3641007
GCGCGCATGCAACAAAAAAATTGCTTAATCCGCTCTCTTGCTCACATTTTGCGCATCAAC
GCGCATTTCTGATGCCTTTTCAGCCACTCATGGTGAAATAATCCAC
(SEQ ID NO: 11)
>fragment_4359424-4359603
GTCGATTCGTTGTGCATGATGTTTCCCCCTTTGCGTCGCGATTCTACGCAACTTTTCCGG
ATTCTGCCGGGTTGCTTCAACAGAAAGAAACTTATTTAAACAAATTAAGTCTGAAATAAC
GCCCGAAACGGAAAAGTGGTTATGTTGATTTCCGCTGCGACGTTTTATAGTACGACTTTC
(SEQ ID NO: 12)

[0224] Any of the sequences SEQ ID NO:1, SEQ ID NO:2, SEQ ID NO:3, SEQ ID NO:4 SEQ ID NO:5, SEQ ID NO:6, SEQ ID NO:7, SEQ ID NO:8, SEQ ID NO:9, SEQ ID NO: 10, SEQ ID NO: 11, SEQ ID NO:12, as well as complements and sequences comprising at least 90% nucleic acid sequence identity thereof can be used to identify and/or distinguish Cronobacter spp. from other Enterobacter serotypes. In some embodiments, a sequence having at least 25 contiguous nucleotides of these sequences as well as complementary sequences and sequences comprising at least 90% nucleic acid sequence identity to SEQ ID NO:1, SEQ ID NO:2, SEQ ID NO:3, SEQ ID NO:4 SEQ ID NO:5, SEQ ID NO:6, SEQ ID NO:7, SEQ ID NO:8, SEQ ID NO:9, SEQ ID NO: 10, SEQ ID NO: 11 and SEQ ID NO:12, may also be used to identify and/or distinguish Cronobacter spp. from other Enterobacter serotypes.

[0225] Assays used for the detection and identification of Cronobacter spp. may include, but are not limited to, use of an oligonucleotide sequence of the disclosure for hybridization, and/or a primer pair that may be used for amplification (PCR) that may be designed based on the SEQ ID NOs: 1-12, and/or possibly in conjunction with a probe for real-time PCR. The length of an oligonucleotide probe and/or primer sequence may be as few as 10, at least 15, at least 20, at least 25, and up to 40 nucleotides in length. Use of larger than 40 nucleotide oligonucleotides are also contemplated. Design of sequences for hybridization detection and PCR may be done by one of skill in the art in light of the teachings of this disclosure, such as for example the unique sequences of Cronobacter spp.

### Example IV. Identification of Cronobacter spp. Specific and Unique Regions

[0226] To identify Cronobacter spp., the nine newly assembled draft Cronobacter genomes, the two published Cronobacter genomes, and 45 closely related Enterobacter genomes downloaded from NCBI were compared. An in-house pipeline called SIGA was used to align the genomes to a Cronobacter reference genome and identify sequence segments that are shared by all 11 Cronobacter genomes with at least 95% identity but are at least 20% divergent in all the other 45 Enterobacter genomes. The resulting sequences were screened against the GenBank bacterial, viral, fungal and plant sequences using BLASTN, and any sequence having a BLAST hit with at least 80% identity over 50 or more nucleotides was excluded from consideration. Cronobacter spp. specific signature sequences were obtained comprising 2,070 bp which are described in Table 3 and include sequences comprising SEQ ID NO:1, SEQ ID NO:2, SEQ ID NO:3, SEQ ID NO:4 SEQ ID NO:5, SEQ ID NO:6, SEQ ID NO:7, SEQ ID NO:8, SEQ ID NO:9, SEQ ID NO: 10, SEQ ID NO: 11 and SEQ ID NO:12.

### Example V. Identification of Species Specific and Unique Regions

[0227] The approach of Example V was also used to identify sequences that are present in available genomes of all strains (with at least 97% identity) of a particular Cronobacter species but are absent (at least 20% divergent) from any other Cronobacter or Enterobacter genomes. The analysis resulted in 102, 87, 69, 412, 135, 393, and 65 sequences longer than 100 nucleotides comprising 31, 18, 16, 111, 46, 100 and 28 kb that are specific to C. sakazakii, C. turicensis, C. malonaticus, C. muytjensii, C. genomosp1, C dublinensis, and C sakazakii 701 (a ST4 strain), respectively. Table 4 summarizes the number of signature sequences identified for each species. The sequences specific to each species are listed in SEQ ID NO: 16-117 (C. sakazakii), SEQ ID NO: 118-204 (C. turicensis), SEQ ID NO: 205-273 (C. malonaticus), SEQ ID NO: 274-685 (C. muytjensii), SEQ ID NO: 686-820 (C. genomosp1), SEQ ID NO: 821-1213 (C dublinensis) and SEQ ID NO: 1214-1278 (C sakazakii ST4 strain).

TABLE 4

| | | | Range of | | | |
|---|---|---|---|---|---|---|
| | Strains with | Num of | Sequence | | | |
| | available | Signature | Length | Average | Median | Total Length |
| Species | genomes | Sequences | (median) | Length (nt) | Length (nt) | (nt) |
| Cronobacter spp. | 680, 696, 701, | 12 | 104-448 | 173 | 148 | 2,070 |
| | BAA-894, 564, | | | | | |
| | z3032, 507, 681, | | | | | |
| | 530, 581, 582 | | | | | |
| C. sakazakii | 680, 696, 701, | 102 | 101-3,625 | 308 | 160 | 31,366 |
| | BAA-894 | | | | | |
| C. turicensis | 564, z3032 | 87 | 100-1,375 | 216 | 141 | 18,774 |
| C. malonaticus | 507, 681 | 69 | 101-2,265 | 234 | 160 | 16,162 |
| C. muytjensii | 530 | 412 | 100-3,966 | 270 | 153 | 111,143 |
| C. genomosp1 | 581 | 135 | 100-2,498 | 343 | 184 | 46,364 |
| C. dublinensis | 582 | 393 | 100-4,784 | 254 | 159 | 99,796 |
| C sakazakii ST4 | 701 | 65 | 100-3,556 | 429 | 250 | 27,858 |
| strain | | | | | | |

[0228] In some embodiments, the signature sequences, as well as complements and sequences comprising at least 90% nucleic acid sequence identity thereof can be used for designing genetic assays (real-time PCR, PCR) that specifically detect and differentiate Cronobacter spp. or particular Cronobacter species in samples such as but not limited to foods, beverages, clinical samples, environmental samples.

### Example VI. Assays to Specifically Detect Cronobacter Spp.

[0229] Exemplary real-time PCR assays were designed from specific and unique and specific Cronobacter spp. sequence regions SEQ ID NO:1, SEQ ID NO:2, SEQ ID NO:3, SEQ ID NO:4 SEQ ID NO:5, SEQ ID NO:6, SEQ ID NO:7, SEQ ID NO:8, SEQ ID NO:9, SEQ ID NO: 10, SEQ ID NO: 11 and SEQ ID NO:12. These identified Cronobacter spp. target sequences were used to design primers and probes for real-time PCR assays. Programs for assay design include Primer3 (Steve Rozen and Helen J. Skaletsky (2000) “Primer3” on the World Wide Web for general users and for biologist programmers as published in: Krawetz S, Misener S (eds) Bioinformatics Methods and Protocols: Methods in Molecular Biology. Humana Press, Totowa, N.J., pp 365-386), Primer Express® software (Applied Biosystems), and OLIGO 7 (Wojciech Rychlik (2007). “OLIGO 7 Primer Analysis Software”. Methods Mol. Biol. 402: 35-60)). The subsequently designed PCR primers and probes for use in assays by real-time PCR can detect unambiguously, specifically and with great sensitivity Cronobacter spp. The identified target sequences were used to design primers and probes for detection, identification, quantization, and/or differential detection of a Cronobacter spp. organism.

### Example VII. Assay to Specifically Detect Cronobacter Spp.

[0230] According to one embodiment, an exemplary method for detection of Cronobacter spp. may comprise hybridization a polynucleotide primer to a target nucleic acid sequence unique to Cronobacter spp; amplification of the target nucleic acid sequence using methods selected from the group comprising polymerase chain reaction (PCR), RT-PCR, asynchronous PCR (A-PCR), and asymmetric PCR (AM-PCR), strand displacement amplification (SDA), multiple displacement amplification (MDA), nucleic acid strand-based amplification (NASB A), rolling circle amplification (RCA), transcription-mediated amplification (TMA); and detection of the amplified target nucleic acid sequence is indicative of the presence of Cronobacter spp. in the test sample.

[0231] In one example embodiment a method may use a forward and reverse primer pair as described in SEQ ID NO: 13, SEQ ID NO: 14 (Table 5) for amplification as described above. Detection of amplified product may comprise using a probe set forth in SEQ ID NO: 15. Table 5 depicts primer pair and probe sequences that may be used in one example method for detecting Cronobacter spp. targeting the gene recN. This assay matches perfectly or near perfectly to all the nine Cronobacter draft genomes as well as the two public complete Cronobacter genomes, confirming its high coverage in detecting Cronobacter strains. Embodiments may use complements and labeled derivatives of the primer and probe sequences described.

TABLE 5

| Assay | | | |
|---|---|---|---|
| ID | Forward Primer | Reverse Primer | Probe |
| 120 | GAAGAGTACAAACGYTTAGCCAAYAG | CGGCCAGCAGGTTTAAYG | CTGCTGGCTGGTAGAAAG |
| | (SEQ ID NO: 13) | (SEQ ID NO: 14) | (SEQ ID NO: 15) |

[0232] FIG. 1 is a phylogenetic analysis and shows the phylogenetic tree inferred on 100 core genes, the presence of genes from the pan-genome, and the presence of putative virulence genes. The values on the branches are bootstrap values based on 1,000 replicates. FIG. 1A is the neighbor joining tree inferred based on the concatenated DNA sequence alignment of 100 Cronobacter core genes (85,059 nt). FIG. 1B is maximum parsimony tree inferred based on the presence and absence of the 6,156 genes in the pan genome. FIG. 1C is maximum parsimony tree inferred based on the presence and absence of 174 putative virulence genes, including fimbrial clusters, iron uptake system, some C. sakazakii specific genes, and putative type VI seCretion system.

[0233] Table 6 depicts the presence of the C. sakazakii BAA-894 fimbrial clusters in the other nine strains.

TABLE 6

| C. sakazakii | | | | | | | | | | |
|---|---|---|---|---|---|---|---|---|---|---|
| BAA-894 Gene | Function | Csak701 | Csak696 | Cmal681 | Cmal507 | Csp1581 | Cturz3032 | Ctur564 | Cdub582 | Cmuy530 |
| ESA_01970- | Pilin FimA, Usher FimD, | − | − | − | − | − | − | − | − | − |
| ESA_01976 | Chaperone FimC | | | | | | | | | |
| ESA_02538 | Pilin FimA | + | + | + | + | + | + | − | − | + |
| ESA_02539- | Chaperone FimC, Usher | + | + | + | + | + | + | + | − | − |
| ESA_02541 | FimD, Pilin FimA (FimH) | | | | | | | | | |
| ESA_02542 | Putative minor component | + | + | − | − | − | + | + | − | − |
| | FimG | | | | | | | | | |
| ESA_02795 | Fimbrial protein | + | − | + | + | − | − | − | − | − |
| ESA_02796- | Pilin FimA, Usher FimD, | + | + | + | + | − | − | − | − | − |
| ESA_02798 | Chaperone FimC | | | | | | | | | |
| ESA_02799, | Putative fimbrial protein | + | + | − | − | − | − | − | − | − |
| ESA_04067, | | | | | | | | | | |
| ESA_04069 | | | | | | | | | | |
| ESA_04068 | Fimbrial protein | − | + | − | − | − | − | − | − | − |
| ESA_04070 | Fimbrial protein | + | + | + | + | + | + | + | − | − |
| ESA_04071 | Usher FimD | + | + | + | + | + | + | + | − | + |
| ESA_04072 | Chaperone FimC | + | + | + | + | + | + | + | + | + |
| ESA_04073 | Fimbrial protein | + | + | − | − | − | − | + | − | − |

[0234] Table 7 depicts the presence of the putative C. sakazakii BAA-894 iron uptake genes in the other nine strains.

TABLE 7

| C. sakazakii | | | | | | | | | | |
|---|---|---|---|---|---|---|---|---|---|---|
| BAA-894 Gene | Function | Csak701 | Csak696 | Cmal681 | Cmal507 | Csp1581 | Cturz3032 | Ctur564 | Cdub582 | Cmuy530 |
| ESA_00459 | fepE, ferric enterobactin | + | + | + | + | + | + | + | − | − |
| | transport | | | | | | | | | |
| ESA_00791 | fepC, hypothetical | + | + | + | + | + | + | + | + | + |
| | protein | | | | | | | | | |
| ESA_00792 | fepG, iron-enterobactin | − | + | + | + | + | + | + | − | + |
| | transporter permease | | | | | | | | | |
| ESA_00793 | fepD, iron-enterobactin | + | + | + | + | + | + | − | + | + |
| | transporter | | | | | | | | | |
| ESA_00794 | entS, enterobactin exporter | − | − | + | + | − | + | − | + | − |
| | EntS | | | | | | | | | |
| ESA_00796- | fepB, iron-enterobactin | + | + | + | + | + | + | + | + | + |
| ESA_00799 | transporter, entC, entB, | | | | | | | | | |
| | entA | | | | | | | | | |
| ESA_01552 | iroN, outer membrane | + | + | + | + | + | + | + | + | + |
| | receptor FepA | | | | | | | | | |
| ESA_02727 | entF, enterobactin synthase | + | + | + | + | + | + | + | + | + |
| | subunit F | | | | | | | | | |
| ESA_02729 | entE, enterobactin synthase | + | + | + | + | + | + | + | + | − |
| | subunit E | | | | | | | | | |
| ESA_02730 | fepA, outer membrane | + | + | + | + | + | + | + | + | + |
| | receptor FepA | | | | | | | | | |
| ESA_02731 | entD, hypothetical protein | + | + | + | + | + | + | + | + | + |
| ESA_03187 | fhuB, iron-hydroxamate | − | + | + | − | − | + | − | − | − |
| | transporter permease | | | | | | | | | |
| ESA_03188 | fhuD, iron-hydroxamate | + | + | + | + | + | + | + | + | + |
| | transporter | | | | | | | | | |
| ESA_03190 | fhuA, ferrichrome outer | + | + | + | + | + | + | + | + | + |
| | membrane transporter | | | | | | | | | |
| ESA_03959 | ibpB, heat shock chaperone | + | + | + | + | + | + | + | + | + |
| | lbpB | | | | | | | | | |
| ESA_03960 | ibpA, heat shock | + | + | + | + | + | + | + | + | + |
| | protein lbpA | | | | | | | | | |
| pESA3p05547 | iucA, hypothetical protein | − | + | + | + | + | + | + | − | + |
| pESA3p05548- | iucB, iucC, iucD | + | + | + | + | + | + | + | + | + |
| pESA3p05550 | | | | | | | | | | |
| pESA3p05551 | iutA, hypothetical protein | + | + | + | + | − | + | + | + | + |

[0235] While the foregoing specification teaches the principles of the present claimed embodiments, with examples provided for the purpose of illustration, it will be appreciated by one skilled in the art from reading this disclosure that various changes in form and detail can be made without departing from the spirit and scope of the invention. These methods are not limited to any particular type of nucleic acid sample: plant, bacterial, animal (including human) total genome DNA, RNA, cDNA and the like may be analyzed using some or all of the methods disclosed in this invention. This invention provides a powerful tool for analysis of complex nucleic acid samples. From experiment design to detection of Cronobacter spp. assay results, the above invention provides for fast, efficient and inexpensive methods for detection of pathogenic Cronobacter spp.

### Example VIII. Control Based Threshold (CBT) Variation

[0236] The present example describes testing an example embodiment of a computer program of the disclosure with instructions being executed on a processor so as to perform a method for PCR analysis.

[0237] In one embodiment, as described in sections above, a control based threshold (CBT) method may comprise providing CBT instructions to a user for setting a threshold. Instructions to a user may indicate that a user set a threshold line at the level of a positive control plateau and then lower it to a pre-defined percentage of the plateau.

[0238] To test how much the Ct's would change if the threshold was set artificially to a “high” CBT (above the control threshold) and/or to a “low” CBT (below the control threshold), data was analyzed from almost 200 field samples (having approximately 100 positive and 100 negative samples) on three runs.

[0239] The results are shown in FIG. 4A for artificially set “high” CBT (above the control threshold) and in FIG. 4B for artificially set “low” CBT (below the control threshold) in comparison to CBT set by methods of the disclosure, and show that there were no changes in diagnostic calls (see FIGS. 4A and 4B).

### Example IX. CBT Variation

[0240] In this experiment, five different users were asked to analyze data from a PCR run using the Control-Based Threshold method. There was minimal variation between users in threshold setting and diagnostic calls were consistent between all 5 users. Results of this experiment are shown in FIG. 5, which show that setting a threshold using the present CBT method and algorithms provide consistent analysis of PCR data between different users.

### Example X. CBT Threshold Procedure

[0241] A graphical representation of one example manual way to obtain the proper threshold using CBT is shown in FIGS. 6A and 6B. Such a method may comprise determining which wells contain a positive PCR control; determining the dRN of the positive control at cycle 40 (or the last PCR cycle number chosen by user) (for example, this may be by dragging the threshold up to the plateau and reading the result of exporting the dRN into an excel spreadsheet and calculating the average dRN at cycle 40 of the positive controls); taking the pre-defined % of the plateau for that assay (the CBT) and calculating the threshold; the threshold value may then be typed into software (or GUI).

[0242] FIGS. 6A and 6B depict results of a CBT threshold procedure and show Step 1 comprising position threshold at plateau of positive control and record instrument dRn value which equals 3.32754 (FIG. 6A) and Step 2 shows position threshold at a pre-defined % of plateau of positive control determined in step 1 which is equal to 0.332754 (FIG. 6B).

### Example XI. Utilization of CBT Threshold

[0243] Threshold settings Allows for reproducible results across multiple users and multiple laboratories. Minimal variation observed in Ct values (<1 Ct) among users. No changes in positive or negative calls between users.

[0244] Deviation from user provided instructions: Example of the variation in threshold setting needed to change the results by 2Ct's; Significantly greater that what is seen with CBT method users; and Example below would be considered off-label use of product

[0245] FIG. 7A and FIG. 7B depict that the present CBT is more consistent than other threshold setting methods. As shown above, FIG. 4 showed high level of consistency between multiple users employing the CBT method. For most of the assays tested by the present inventors have CT ranges in which the sample is called as “suspect”. For example, if a sample has a CT between 38-40CT's it is considered a suspect sample. To address if a user may be able to arrive at desired results by making small adjustments to the threshold tests were performed that showed that even relatively large changes to the threshold setting do not result in changes in sample calls from positive to negative. It was shown that to change a call from a positive a user would have to adjust the threshold so much that it would result in a at least 2CT difference. FIGS. 6A and 6B show graphs showing the amount of variation in threshold setting that would be need to change the CT by >2. This is significantly more that what is shown in FIG. 3A or 4.

[0246] Ability to modify threshold setting to influence result:
[0247] CBT is based on set % from the assay control positive amplification plot. Data above confirm that the amount of CBT variation between upper and lower settings is less than 1 Ct.
[0248] No change in positive or negative calls in experiments with 5 separate users (When following instructions for use, cannot change a diagnostic call).
[0249] Additional Control—Suspect Workflow in 38-40 Ct range: Even if threshold is adjusted to maximum for a borderline result, 37Ct for example, the result would be pushed into 38-40 “suspect workflow” that recommends additional testing and confirmation by another method if inconclusive.
[0250] Deviating from the method (% range) would be is an off-label use of the product and would not be supported.
[0251] Real-Time PCR data (.sds files) clearly display what % range was used to make a diagnostic call.

[0252] All publications and patent applications cited herein are incorporated by reference in their entirety for all purposes to the same extent as if each individual publication or patent application were specifically and individually indicated to be so incorporated by reference. Although the present invention has been described in some detail by way of illustration and example for purposes of clarity and understanding, it will be apparent that certain changes and modifications may be practiced within the scope of the appended claims.

### REFERENCES

[0253] The following references, to the extent that they provide exemplary procedural or other details supplementary to those set forth herein, are specifically incorporated herein by reference:
[0254] 1: Aziz, R. K., et al. (2008) The RAST Server: rapid annotations using subsystems technology, BMC Genomics, 9, 75.
[0255] 2: Joseph, S, and Forsythe, S. (2011) Predominance of Cronobacter sakazakii ST4 in neonatal infections. Emerging Infectious Disease, In Press.
[0256] 3: Kucerova, E., et al. (2010) Genome sequence of Cronobacter sakazakii BAA-894 and comparative genomic hybridization analysis with other Cronobacter species, PLoS One, 5, e9556.
[0257] 4: Kucerova, E., Joseph, S, and Forsythe, S. (2011) Cronobacter: ubiquity and diversity. Quality Assurance and Safety of Crops and Foods, In Press.
[0258] 5: Kurtz, S., et al. (2004) Versatile and open software for comparing large genomes, Genome Biol, 5, R12.
[0259] 6: Stephan, R., et al. (2011) Complete genome sequence of Cronobacter turicensis LMG 23827, a food-borne pathogen causing deaths in neonates, J Bacteriol, 193, 309-310. Zerbino, D. R. and Birney, E. (2008) Velvet: algorithms for de novo short read assembly using de Bruijn graphs, Genome Res, 18, 821-829.
[0260] 7: Lai, K. K. (2001) Enterobacter sakazakii infections among neonates, infants, children, and adults. Case reports and a review of the literature, Medicine (Baltimore), 80, 113-122.

1. An isolated nucleic acid sequence having SEQ ID NO:1, SEQ ID NO:2, SEQ ID NO:3, SEQ ID NO:4, SEQ ID NO:5, SEQ ID NO:6, SEQ ID NO:7, SEQ ID NO:8, SEQ ID NO:9, SEQ ID NO: 10, SEQ ID NO: 11, SEQ ID NO:12, fragments thereof, at least 25 contiguous nucleotide sequences thereof, complements thereof or sequences comprising at least 90% nucleic acid sequence identity thereto.

2-13. (canceled)

14. An isolated nucleic acid sequence comprising SEQ ID NO: 13-1278, complements thereof, fragments thereof and labeled derivatives thereof and sequences comprising at least 90% nucleic acid sequence identity thereof.

15. (canceled)

16. A method of distinguishing an organism belonging to a Cronobacter spp. from a non-Cronobacter spp. strain comprising: detecting at least one nucleic acid sequence comprising SEQ ID NO:1, SEQ ID NO:2, SEQ ID NO:3, SEQ ID NO:4 SEQ ID NO:5, SEQ ID NO:6, SEQ ID NO:7, SEQ ID NO:8, SEQ ID NO:9, SEQ ID NO: 10, SEQ ID NO: 11, SEQ ID NO:12, fragments thereof or complements thereof, wherein detection of one of these nucleic acid sequences is indicative of the presence of a Cronobacter spp and the absence of a non-Cronobacter spp.

17. The method of claim 16, wherein detecting the at least one nucleic acid sequence comprises at least one technology selected from the group consisting of amplification, hybridization, mass spectrometry, nanostring, microfluidics, chemiluminescence, enzyme technologies and combinations thereof.

18. The method of claim 17, wherein amplification is selected from the group consisting of polymerase chain reaction (PCR), RT-PCR, asynchronous PCR (A-PCR), and asymmetric PCR (AM-PCR), strand displacement amplification (SDA), multiple displacement amplification (MDA), nucleic acid strand-based amplification (NASBA), rolling circle amplification (RCA), transcription-mediated amplification (TMA).

19. The method of claim 16, further comprising isolating nucleic acid from a sample suspected of being contaminated with a Cronobacter organism.

20. The method of claim 19, wherein the sample is a food sample, an agricultural sample, a produce sample, an animal sample, an environmental sample, a biological sample, a water sample and an air sample.

21. A method for detecting Cronobacter spp. in a sample comprising the steps of:
a) providing an isolated nucleotide sequence of a Cronobacter spp. specific nucleotide sequence comprising SEQ ID NO:1, SEQ ID NO:2, SEQ ID NO:3, SEQ ID NO:4 SEQ ID NO:5, SEQ ID NO:6, SEQ ID NO:7, SEQ ID NO:8, SEQ ID NO:9, SEQ ID NO: 10, SEQ ID NO: 11, SEQ ID NO:12, fragments thereof, at least 25 nucleotide sequences thereof, complements thereof, sequences comprising at least 90% nucleic acid sequence identity thereof, or a labeled derivative thereof;
b) contacting the isolated nucleotide sequence with the sample under hybridization conditions; and
c) detecting hybridization of at least one of the isolated nucleotide sequences of a Cronobacter spp. specific nucleotide sequence to a complementary nucleotide sequence in the sample,
wherein detection of a hybrid molecule is indicative of the presence of a Cronobacter spp in the sample.

22. A method for detecting a Cronobacter spp. in a sample comprising the steps of:
a) hybridizing at least a first pair of polynucleotide primers to a first target nucleic acid sequence specific to the Cronobacter spp.;
b) amplifying the first target nucleic acid sequence or a fragment thereof to form a first amplified target nucleic acid sequence product; and
c) detecting the at least first amplified target nucleic acid sequence product, wherein detection of the at least first amplified target nucleic acid sequence product is indicative of the presence of the Cronobacter spp. in the sample.

23. The method of claim 22 further comprising:
a) hybridizing a second pair of polynucleotide primers to the second target nucleic acid sequence specific to the Cronobacter spp.;
b) amplifying the second target nucleic acid sequence to form a second amplified target nucleic acid sequence product; and
c) detecting the second amplified target nucleic acid sequence product, wherein detection of the second amplified target nucleic acid sequence product is indicative of the presence of the Cronobacter spp.

24. The method of claim 23 wherein the first target nucleic acid sequence specific to Cronobacter spp. and the second target nucleic acid sequence specific to Cronobacter spp. are selected from the group consisting of SEQ ID NO:1, SEQ ID NO:2, SEQ ID NO:3, SEQ ID NO:4 SEQ ID NO:5, SEQ ID NO:6, SEQ ID NO:7, SEQ ID NO:8, SEQ ID NO:9, SEQ ID NO: 10, SEQ ID NO: 11, SEQ ID NO:12, fragments thereof, at least 25 nucleotide sequences thereof, complements thereof and sequences comprising at least 90% nucleic acid sequence identity thereof, wherein the first and the second target nucleic acids are different from each other.

25. The method of claim 24 wherein the first or the second primer pair comprises SEQ ID NO:13 and SEQ ID NO:14 complements thereof, and labeled derivatives thereof.

26. The method of claim 25, wherein the detecting comprises using a probe having SEQ ID NO:15 complements thereof, and labeled derivatives thereof.

27. The method of claim 22 further comprising detecting the species of the Cronobacter comprising:
detecting a Cronobacter species-specific target nucleic acid sequence comprising detecting the presence of at least one nucleic acid selected from SEQ ID NOs:16-1278, wherein the detection of a nucleic acid having SEQ ID NO: 16-117 is indicative of the presence of C. sakazakii, the detection of a nucleic acid having SEQ ID NOs:118-204 is indicative of the presence of C. turicensis, the detection of a nucleic acid having SEQ ID NOs:205-273 is indicative of the presence of C. malonaticus; the detection of a nucleic acid having SEQ ID NOs:274-685 is indicative of the presence of C. muytjensii, the detection of a nucleic acid having SEQ ID NOs:686-820 is indicative of the presence of C. dublinensis; the detection of a nucleic acid having SEQ ID NOs:821-1213 is indicative of the presence of C. genomosp. 1; and the detection of a nucleic acid having SEQ ID NOs:1214-1278 is indicative of the presence of C. sakazakii ST4 strain.

28. A method for distinguishing an organism from an Cronobacter spp. comprising analyzing the genome of the organism for the presence of a sequence selected from the group consisting of SEQ ID NO:1, SEQ ID NO:2, SEQ ID NO:3, SEQ ID NO:4 SEQ ID NO:5, SEQ ID NO:6, SEQ ID NO:7, SEQ ID NO:8, SEQ ID NO:9, SEQ ID NO: 10, SEQ ID NO: 11, SEQ ID NO:12, fragments thereof, at least 25 nucleotide sequences thereof and sequences comprising at least 90% nucleic acid sequence identity thereof by the method of claim 1.

29. The method of claim 28, wherein the organism is a strain of Enterobacter.

30. A kit for the detection of Cronobacter spp. comprising:
at least one pair of PCR primers designed to bind to and hybridize to at least one or more nucleic acid sequences of SEQ ID NO:1, SEQ ID NO:2, SEQ ID NO:3, SEQ ID NO:4 SEQ ID NO:5, SEQ ID NO:6, SEQ ID NO:7, SEQ ID NO:8, SEQ ID NO:9, SEQ ID NO: 10, SEQ ID NO: 11, SEQ ID NO:12, fragments thereof, complementary sequences thereof, sequences comprising at least 90% nucleic acid sequence identity thereof and complementary sequences comprising at least 90% nucleic acid sequence identity thereof; and
at least one probe designed to bind to and hybridize to a PCR product formed by amplification of the nucleic acid sequences of SEQ ID NO:1, SEQ ID NO:2, SEQ ID NO:3, SEQ ID NO:4 SEQ ID NO:5, SEQ ID NO:6, SEQ ID NO:7, SEQ ID NO:8, SEQ ID NO:9, SEQ ID NO: 10, SEQ ID NO: 11, SEQ ID NO:12, fragments thereof, complementary sequences thereof, sequences comprising at least 90% nucleic acid sequence identity thereof and complementary sequences comprising at least 90% nucleic acid sequence identity thereof.

31. The kit of claim 30, further comprising one or more components selected from a group consisting of: at least one enzyme, dNTPs, at least one buffer, at least one salt, at least one control nucleic acid sample and an instruction protocol.

32. The kit of claim 30, wherein the probe is labeled.

33. The kit of claim 30, wherein at least one primers of the PCR primer pair is a labeled primer.

34. The kit of claim 28, wherein:
at least one pair of PCR primer selected from a group of nucleic acid sequences comprising of SEQ ID NO:13, SEQ ID NO:14, SEQ ID NO:15, fragments comprising at least 10 contiguous nucleotide sequences thereof, complements thereof and labeled derivatives thereof; and
at least one probe selected from a group of nucleic acid sequences consisting of SEQ ID NO:13, SEQ ID NO:14, SEQ ID NO:15, fragments comprising at least 10 contiguous nucleotide sequences thereof, complements thereof and labeled derivatives thereof.

35. A kit for the detection of Cronobacter spp. comprising:
at least one pair of PCR primers designed to bind to and hybridize to at least one or more nucleic acid sequences of SEQ ID NOs:1-12, SEQ ID NOs:16-1278, fragments thereof, complementary sequences thereof, sequences comprising at least 90% nucleic acid sequence identity thereof and complementary sequences comprising at least 90% nucleic acid sequence identity thereof; and
at least one probe designed to bind to and hybridize to a PCR product formed by amplification of the nucleic acid sequences of SEQ ID NOs:1-12, SEQ ID NOs:16-1278, fragments thereof, complementary sequences thereof, sequences comprising at least 90% nucleic acid sequence identity thereof and complementary sequences comprising at least 90% nucleic acid sequence identity thereof; and
one or more components selected from a group consisting of: at least one enzyme, dNTPs, at least one buffer, at least one salt, at least one control nucleic acid sample and an instruction protocol.

36. A method for detecting a Cronobacter species or strain in a sample comprising:
a) hybridizing a first pair of polynucleotide primers to the at least a first target nucleic acid sequence specific to the first Cronobacter species or strain;
b) amplifying the at least first target nucleic acid sequence specific to the first Cronobacter species or strain to form a first amplified target nucleic acid sequence product; and
c) detecting the first amplified target nucleic acid sequence product, wherein detection of the first amplified target nucleic acid sequence product is indicative of the presence of the first Cronobacter species or strain.

37. The method of claim 36 further operable to distinguish between Cronobacter species or strain of the species C. sakazakii, C. turicensis, C. malonaticus, C. muytjensii, C. dublinensis, C. genomosp. 1 and C. sakazakii ST4 strain.

38. The method of claim 37 wherein the at least first target nucleic acids may comprise isolated sequences described in SEQ ID NOs:16-1278, fragments thereof, at least 25 nucleotide sequences thereof, complements thereof and sequences comprising at least 90% nucleic acid sequence identity thereof.

39-41. (canceled)

The application's sequence listing, which the Patent Office published only in electronic form, follows.

SEQUENCE LISTING (1278 sequences)

SEQ ID NO: 1 - DNA, 149 bp, Cronobacter sakazakii
tgggaatgtgagctctggggcagtcgtggctccttccacagcacctgttgttagcacgcaagaaccgaccgtaagcagcacgaccaatagcgcacctgtcgctacctggcgctggccgactgaaggcaacgttatcgagaacttctccg

SEQ ID NO: 2 - DNA, 104 bp, Cronobacter sakazakii
aatgaagcccatcgcccgacccgcgctcaggacgctatcgacgttaaactgcgcgcttaaaaaaataatacgcttttcccgaatcaggccaggaagctccggca

SEQ ID NO: 3 - DNA, 146 bp, Cronobacter sakazakii
tcgtcctgggagttttgattggccataaggtgacatctcggggaggtttaagcagttacattacctgcattattctaacaaaacattaacagtaacgcgtacacttttggtctaaacttagcactgaaaatgcagctgacaagcaa

SEQ ID NO: 4 - DNA, 105 bp, Cronobacter sakazakii
ttctccatacgtttgcattttcactacgtgattgaagcgaaaaccataccattaaaggcgctatgccgacaacaaacgcggcggagggtaaatggtttcaccggg

SEQ ID NO: 5 - DNA, 448 bp, Cronobacter sakazakii
ggcgttgctgtttccatgtgtatcaatcctttaccctgaataattgttgtttttttgttgcttttatcgccagaaaaaaagcacaacgaagaaagtgttccaatttactggtcaataaaatagcatctgatttgcttagatatatttatcgaaatttggtagcagagactttaaataatttcgtttatcattctgtgcgacattatttttaacgattcagcaccgggaataattatttccgcgccgttattgtttctcatttgaaaccgccttgttaatttattgtatgttattttctccccgatatactcaattcccgtcttgaccttactttacataggattttgttataacccttgccatgtggctgtcatggcttacattttacattttgttgcattggctgtgacggtagcgacagaacccggttacaccccgcagacagtgc

SEQ ID NO: 6 - DNA, 146 bp, Cronobacter sakazakii
ccacgcggcatgggccgtggtttttgctcgctttggtctgcacagcataaaagaaagtggtattctcgggctattgcccaggcccgtcttgcggcacatcacaacgataacccagaggcccgcacgccgcgctgcaccgggcccag

SEQ ID NO: 7 - DNA, 233 bp, Cronobacter sakazakii
cttatttgctgtgcgcatgagtacacattaagcaatcttaagtttttagtggctattttgccggacgatcccgctttaacccaatattatcgagaagttaatgagttacgtgcaaaaaatcaaaaaacactaccctcaattcttaaaaatgagcgccaaataaatctttacctgcgattagaagacgatgatttaattgataaaattaatccagatcttcggttgtccactcc

SEQ ID NO: 8 - DNA, 154 bp, Cronobacter sakazakii
gcataaaaaagccgtgacaaccacggctcgcccgacaggccaggctcacccacccgtattcaggtggcgcagactatatcaccgaagcagagcgctcacaaataacctcgccttcaccgtatgattaatcatcagcttgcgagacgcgtcaccc

SEQ ID NO: 9 - DNA, 133 bp, Cronobacter sakazakii
ttaagcgaggcgcagcgcaagggggtggaagtgctggcctggaaggcctcgctctccgccagtgagataacgctgacgtcgcctttgccggttcgcttataaccagttgatccgcaatcgactaataatgata

SEQ ID NO: 10 - DNA, 166 bp, Cronobacter sakazakii
gccagccaccgccagacgacctgtctggatgttcccacaatccttcctcatgttaattgactgaccggcagcctcatgccgcctgaaattctcagatacttcatgctaaccaggcgaaggccgttgcgccatgtcgcgaacatttttttaccattcgcgcattaat

SEQ ID NO: 11 - DNA, 106 bp, Cronobacter sakazakii
gcgcgcatgcaacaaaaaaattgcttaatccgctctcttgctcacattttgcgcatcaacgcgcatttctgatgccttttcagccactcatggtgaaataatccac

SEQ ID NO: 12 - DNA, 180 bp, Cronobacter sakazakii
gtcgattcgttgtgcatgatgtttccccctttgcgtcgcgattctacgcaacttttccggattctgccgggttgcttcaacagaaagaaacttatttaaacaaattaagtctgaaataacgcccgaaacggaaaagtggttatgttgatttccgctgcgacgttttatagtacgactttc

SEQ ID NO: 13 - DNA, 26 bp, Artificial Sequence
  Description of Artificial Sequence: Synthetic primer
gaagagtacaaacgyttagccaayag

SEQ ID NO: 14 - DNA, 18 bp, Artificial Sequence
  Description of Artificial Sequence: Synthetic primer
cggccagcaggtttaayg

SEQ ID NO: 15 - DNA, 18 bp, Artificial Sequence
  Description of Artificial Sequence: Synthetic probe
ctgctggctggtagaaag

SEQ ID NO: 16 - DNA, 592 bp, Cronobacter sakazakii
taactctgttttcggatcttcttaaatgtgattcgccgatttgtaaaatatcattagttttcacaaagcagccgccttttatacctccccaccgttaaagcacaacattacttttttaaaactttaatgtgcttttcgtgagttattttccatatttgttcattagtggatgccttaactgcgtacgcgtttttctgctatttatttcgggaatgtgtaattactttttattgacggaaagatttgtattcttttacaggaattttttgtggaaattgcatcgtggcgatataggtaaaactacttttatgtagtcaggtcgcgggtacaacaactatcaattcgcagcctgtaaacaaggattgttgaggaattaacgtgattttttatcgtgcaaccgtatgtatagcgatcctgtcgttgctggcggccgttcgctcccaggctttcgccgatactcctgaaaatcagcagtcattaaatcaaaaacagcagaacgaagcccgccaggaaagcctggctacgcaaagtaaatccttactttcatccaccagtaataaacctgaagaggggctgaatttacctcaggaag

SEQ ID NO: 17 - DNA, 132 bp, Cronobacter sakazakii
agagcatattcgccagcaactgtcggtatgaacgctggcaagcgacgctatttcgcgatgcctgacagcgcgttatgtgattgagtgactaagggtgccggtcaccagatccagcagcctgatcgtcaggaa

SEQ ID NO: 18 - DNA, 131 bp, Cronobacter sakazakii
tgtctctctgtcgctcaggccctgtttcaggaggccaagacattcatccaccgcgattttcccggcctgcttctgaaatggcggcgatgccagtagctggctgacggcgttaattagcgtactcatgaaca

SEQ ID NO: 19 - DNA, 171 bp, Cronobacter sakazakii
atgctgtctcagtagccgggcatgatcttcctgatagacagactgcaacaggcgcaaattatcggtgcgcagcggatcacccaggctttcggcatacgtgagggctgcagcaaagcgcaactgcagagtgtggtcagcgtcttcgagcgcggcggtgtccagcactcccga

SEQ ID NO: 20 - DNA, 151 bp, Cronobacter sakazakii
tggtttcggctgaggctgttaagtgcttcgggccgattcccgccaggcacagttgtctgtaccgttggcacaatgctcctcttactgacgattaacggcacccgatttttctctgctggcacgattaaaccgccgacaaatgaagggcatg

SEQ ID NO: 21 - DNA, 106 bp, Cronobacter sakazakii
gcgcttcaggagctgcactggggggcgttcggcgatgccctgcgcttaggtgaaccccagtacaaaaccgcgttgttaccgccggtgtatgacgacaccgccagat

SEQ ID NO: 22 - DNA, 110 bp, Cronobacter sakazakii
tagggaaattgcggcgggcgtaaacggtcagatctccggtacgttttcgtagcctgtcagcatcagcagcaggttttctttggtgcctgccgggttaaagctgtaattgc

SEQ ID NO: 23 - DNA, 158 bp, Cronobacter sakazakii
aaatgtgccgtcacttcacggcgcactttctttgtcagctaatagtattgaaagagcaattatattcctgatatcagttgctctgtttactatttccttcatttaagttaattctcagattgcagtcactatcgccgcttttcatgggtgaatttaaa

SEQ ID NO: 24 - DNA, 108 bp, Cronobacter sakazakii
atgagatggtgtttaaagcgtgacagcgaatacgccaggctcgtaagggcgtggctggactgccatgccatcgcgatgccagcaacgtctcgccatggaaaacggcgg

SEQ ID NO: 25 - DNA, 249 bp, Cronobacter sakazakii
ggagtggagatgtccatttcgttggatttcaaaaggatgtgatatttgtagttatcgtgggttatcacgcagaagggtatgataaccaagtctcgggagcagggaaactggtggcgtgcggcaatgcgcgacaccctgaagccgggtcgcaaaaatgcgcgccgaggaaccgcgcgtgggcagggctcctcttttttactgataaaaaaccgcgccgcaatcattcgcgattttacatctggtcacgcc

SEQ ID NO: 26 - DNA, 190 bp, Cronobacter sakazakii
cccgttatcatttttatatttaatttcaatgagttatttttttctctggcaaacgtattgctccgcctgcggcagagaattttttgccaggcgtttttgggtttatcgtggagttttccatagcgtctgcgtgaaaatggcagatttttatgctgatctggcgtgaggtacaggcaggtgccatgagagg

SEQ ID NO: 27 - DNA, 165 bp, Cronobacter sakazakii
aagcctgcagaattacgaacatttgcacgcattgttcaccaacaccgatgagctggcgcgttcgctgaccgccacactgactggccgggttgctgagcaacgcaatgcctggcgcgacgaattacaaaccgtggtgcaggccgtctctggcgagaaggtcattta

SEQ ID NO: 28 - DNA, 125 bp, Cronobacter sakazakii
gtgattctgacttgcgctattcttcgcgcgttaaaaggcccgcgctggcgctttgcgatctcccgtcacagtaccgggctgcggctatttctgcccggtctgttagccccttgcctgataaagtt

SEQ ID NO: 29 - DNA, 156 bp, Cronobacter sakazakii
ctgcttttgttaaaactgtgttaataaagcctctgaaggtctcaggatctccagaggctttttttatacactttcgcactctaagtgactgtaattagctctgataaaacgcccttatcatccactgttccactctcttcatccgcttttgcgact

SEQ ID NO: 30 - DNA, 1954 bp, Cronobacter sakazakii
tttgatggatattttaacgccagaaccagagcacagctattgagatacgaggcgtgatcccagcctgggactgtttccgccgcgatcgtcagtcacctgccagacgatattatccccgccaggctctggcggcagagaataggttgctgatccttttggtggcaacattcttccttgcgtatcaattgttttttcgcccaccatcagggaataaaaggtaatccagtaaggtgtcggattctccgcatgcagggtatttcccgcccggctaaatatcactttttgataatcgctgcgggtcggtgcttttaaaccggcaggacggtaaaataatttcatccgctgattcatggccacagccagcgcatgtcttttttgttccagcccttgcgggctggctttaatcgtgatccagtaaaccgattcccggtcagtgggaagaggtgcatttttgtgaataatatgaagttttctgacgttattcgggtcgagtcggaataacgctggggatacttcaaatggtggtgttgacgcactgtctgttgtgcccgtgactgcatcgctatccacccatgattcaatcagccagcgttctttgctctggtttcgtacggtcaaagaatgttgtttttgtcctggctgataaataacccgcgttccttcaatcacgacgccggtttgcgctccggatgccgtcgctgcaggcgcctggataattcccgtcatggtcatctggacagtatctgcggcctgtgcgccctgcgcccagctaattccacctgaaatgagcaacgtcatcaacgtagtttttgaaaataatttactggcagacataatatttctcctgttattggtaattgatagtcacggtggccgaagcattcgcatcaccggcggcgactatctctgccgtttgtaaataacgggccttccagccaaaattgagtatggttggagtaagtggtttaaattggctaatgctgccgatcggaacgccattattattggcgtccacaatttgaatggccacgccgctggcggtcagtacgctgctgggcgttaatttaatggcgcccggttgaggggtggccgtgtctgccgtggcatccagttttgcatacaccataattccggcagggcagctgagtttaatcggaagctccacactggctgtggtgctgttgataccggtaaactctgtggtgagatgattgtttaaatttgccgcaaccgtaggcgtcagaacggtacatgacagggaaggaacgacaattgttgtatttcccatgttgtacgctctgtcctgatgttccgctgaggaataatagaaatttttgacggccaattgctttatatctaaaaccccggcttctggcgtatcagatgtttttatgagatcgacaatggtcggattcgcatcataagctgcagtcgggcctgtccagacagggcttgaagtatagggggacgtaaaataaaacccattttgcaaaacgcgaaccccaatgccctgaaggtttgtttcatagacatggctgatggaggtttcattcgcagaataagataagtgaaaatgaaaataaccgtaagatccagcgtcacactccatttctttattatttgtggcgggtattgattgcgaagcgataaccccgccgacgggaatatctgatgtcaccgtcactgttccgaaattcacagtcgcatcaggttgcggatagacaacacaattcgctaatgcttgtgttatacccgcaatgagcaaaactaccacacataaagtgtgatataatattttctggtttttcatgttttctaccttaaataaatggctgacttgcattcatccggacgtaataacgccagatgtcatcgcctatttttatactgtttatttcctggctcttgttcaggggtgcagataaaaagagggttgccgcggttttcagggctg

SEQ ID NO: 31 - DNA, 756 bp, Cronobacter sakazakii
aaagcgtaatcgctaattctgttggttcaaggtaattatattttctgataaataatttccctcccattttttcttccatttcgtagattacgcgggcgagaggtgagcgtgttacacacagttgctctgccgcactgttgatgcatttcgcttcaaaacaaacaataaagtattttaatttttttgatattaacaagttcatcattacccccgttcaaaagtttccttcttcaacaacatatttgaagatgattgatgggaaaataataccttccagatccctcatatgtagtagctgtctgtccgtgctcctgtgcaggtctctcacaggtaagatacgcgattagctattatccttggctcaaaaatggctgacagaatgcgcattaatcgcacatttctggatggtaataagcaatgagcggctcatgctgattccgtcattattttaccaggcaaaatttagggcggcataccagaacatgatgttgttgtgcgtgtaattttttatttgatattcgctattagcaggtacagataatagccggtctgtagcaggagagcagtaaaatcaaccgcggacatctctttctgactgactgtaatgtttcaggcgagcagacatgaaatcacaggtatgcgtcagtgtgcgactggttattttttgcctaaagagaggggggtatttacaggaacgggaatgataaacgcatcggtcaggagacgacagatataaaaagagcaagtctctcgact

SEQ ID NO: 32 - DNA, 1701 bp, Cronobacter sakazakii
ggcaaattatatctttattgtattgaacctctgtcattgttcgtgattttatcttttcatctcaacttcatttctgagaaataaatgcgtctaatagtgttttgttttccgggaaagaagtggtaaggaagctctggggatcatggagcaatttcccatcaaccaaactgaagccatttttcagtcctttctccgtgacagtgaatacgccattgacgttacgccagtctggttcttccgtttttaatgtcacttcactggcagtttcaataatataatttttttgtcctttaccctcgtaagtagcgaatttagcacccaaattttgaccatttaccactgcttcaaggaaatcgaaattggctttgtgcgaaaatgaatagcctgcgtctaattcatagttcaaaaagcctgtgtcaagaacggagccggaaaagcctttactacttttaattcttgttgcagtagcagtatcagcttctgtaaatatgaaggtttgctgatgtccttccatatcaaacatggttccatcattgacgtttgccattacaccgttaaacattcgatacgttcccaggtcatgcgctaagtcgtcaacatatctcaagtcagcaccctcattttgagcctgctcgtataagtcagataatatactccgatcttgagttgttaaaaaattaacagaagacatattcatgttattaacatttagctgtgtttgaacaggaggggtagaatcactgtcaccaaaaaggcgagacatcattatccctttaccactaaagctaatgttcgcaatcgctgactctgtattttcttgtgttctgtttaatttaacaggctgagaggaaatggttttcaaacgggtgcctgacgtatcctgcatctgtttgtatgttacgtatgattgattgatcatcataattgatatccctctcgcctgtggttagttaattacatctattggtacttagtaagaaaactcgacggtgacgctttcgttacgtgatggctgtaacgtctctgatggtgcgcctgtaacagtatggcgcagagaaatccgactgccagcatcgaaacgtacatcattcaacgccgtggttgatgatgaagaaccgctgcttaccggaatacaacgtgttgggcctgactgataaggttgatatatgcataattccgtcgtgtgcgtataagcagcgggatatgcggccgaatcaaagcgaatcagagtcaatgttttggttgggtttgcagagcctttttgaaagtcagcaacctggaatgtaaacaaggttgacgtaacaggcgctgtgccagcggagtaaagacggattgaagatggcactactgtctttgtaatggatcccgtcgctgccattgcaggcagagaagcagcacatgcagccagtgctaaagataaataaacaagattttttctcattgtttttccatataaaattccatttttacacagaactgagtataccgttttgagcccttaaggtgcttttgcttccaacatttgcaaaataaccctaagtctggagtaacggcagagaatccatttactttagccaccaaaaataataggtgaccagggaaaatcccttttgcctgctcgcttcatggttttcttatcttcaaaggctgatttaacaccatagataacacttttggtaaggaagacgatgggaacaccga

SEQ ID NO: 33 - DNA, 145 bp, Cronobacter sakazakii
aaagtagtgcactggtagctattgagccaggggcggtagcattgttgaacaggctgctggaaaaatgcttaatatttatccatatagagcgttaaaacctcgataacgtcatgctcacagcgacaacgtgttaattatcattcct

SEQ ID NO: 34 - DNA, 147 bp, Cronobacter sakazakii
atagctcggcggggagatgggctgtctctgataattatttcagaggtttatgaaacataaaggaatggcgcaatggcataaatctgtaaagtgtttacttgctgagattgtgcgcaatgggcctggtcgtctcacgtattaacgtat

SEQ ID NO: 35 - DNA, 128 bp, Cronobacter sakazakii
tgcaaggccattactcaaccgcgccccgtcggtaagctggccaacggccagataagcaagctcacgaaggctggcatcggaaactgtcgtcagccttattctgccaacccgtcatgccatttcagctt

SEQ ID NO: 36 - DNA, 114 bp, Cronobacter sakazakii
tcatttctcgttttttcctgagcggccacggcgtcatcacgctgattcttaatgtatttagctgaagcgcacaacctgaacaccatcacacttcgctaataaattcatcaatca

SEQ ID NO: 37 - DNA, 109 bp, Cronobacter sakazakii
tctgggtgtgcaggaagatctgcttcagccgctgttagcagcgtcacaaaatagaggaaatgaaaggcggagagcattaaaaggcgggaataaaaaccggtaatgacag

SEQ ID NO: 38 - DNA, 141 bp, Cronobacter sakazakii
agagccgcactacccgctaagcaggggggcttataatgtgacgtaaatcacataccaattaatatatcatttaccgtttacattctgaaacgttcaataaaatctaaatcactgtaataaaaggtttttcccttctcctcg

SEQ ID NO: 39 - DNA, 118 bp, Cronobacter sakazakii
cgtgccaaatgccgtcacgcggcgtacatttgattgttcttacactgcttaaaatgtttaattccgcaccgtcccgctcatcacgcttatcgtattagccggaaagcatttaagctat

SEQ ID NO: 40 - DNA, 134 bp, Cronobacter sakazakii
gctatgcgcaaagagtattatttcggatgtattttataaatgcattacgcgacatgtcgttctgtcgccttaatgtctctaaggtattaatcagacatgaaggtacggtttcgtctggctacgcggttgcacaa

SEQ ID NO: 41 - DNA, 160 bp, Cronobacter sakazakii
gcattcggcgatgacgatgagcacgatgacgacaccgacatggcggcagtcgcgccagacgcgtacagacaaattgatgacccgctacaggcgcagcctgtaaacgagcccgaacctgtgccagcggaaagcgcgccagcacctcccgcaccgttgtaca

SEQ ID NO: 42 - DNA, 147 bp, Cronobacter sakazakii
tacgcgccatttacctcacccgggcgcaggtggcgcactcctgtttttactgctgaaagccgcacacttttggctggcgctggggcttccgatgctgcttttggacgaagccatcacgtttccagctgtccttgccgtttacctcat

SEQ ID NO: 43 - DNA, 157 bp, Cronobacter sakazakii
tcttttttcgaagactatgaaccgtgaatctgctaaataaaaaaataaaaaaaagccgctaacgaagagcggcttttttttatccggaaggtaagcgttgcggtttttctcacccgttatagcgggaagaacatcgcgtggcaagagggtttgctgt

SEQ ID NO: 44 - DNA, 183 bp, Cronobacter sakazakii
ccaggaccggcagtgtaaacacttaccctgtccctttagtcatcaatctgttaaccgcggcgttatccgctaaagatacgacgcgcttaaaacgggtattcaggacgaaaagaaaaatccacgccagagcgtggattttacattctcagtcagctttatgagatggaacaccaccccacacgc

SEQ ID NO: 45 - DNA, 165 bp, Cronobacter sakazakii
catgtaaaaactgccctgatagcggggccgccaggtacgaattcacaagagaaacaccattttttaagggattattatccgcatcagtaaatatctcgcctctgtattagtggatcactcatcaatcgctgaccgctgcttattagaatagccagcacgttatgc

SEQ ID NO: 46 - DNA, 108 bp, Cronobacter sakazakii
gactttagcctgcgccccctatgggtccaactggacaagcctcacgattgcgctgaggcttttttatgaatagggtcatctgaccgttaaagtcaaaagaaactgggg

SEQ ID NO: 47 - DNA, 101 bp, Cronobacter sakazakii
tgacgcgcgcatacgactgattttgtgtaacctgttgaatgaacaggataataattagaaatctgtactttgcagcctgcctggctccacattgtccttca

SEQ ID NO: 48 - DNA, 117 bp, Cronobacter sakazakii
atcattgttatcgctgccgcacagtttgtcgcggctttattttgcacgctttttagttacaacatacttttagtgtttgtttttgtgcggcggcctcagcgcaatagcaacaaacaa

SEQ ID NO: 49 - DNA, 145 bp, Cronobacter sakazakii
cgaaagtaagataattaatattatgaatgggattgtcatattttgacgtatttatagggagacgattcacgtgccactcaaggccagcagagaccgatgcgcaggcggcgcacggcagggcggaagtgacaggacggaacggacg

SEQ ID NO: 50 - DNA, 206 bp, Cronobacter sakazakii
ttatagcaacaaaattatttttcggttcaggcattttttgatgcatataaccggtaatgcggcttttacaatgtctattaatacacattctaatgaattgaacatgtaaaaataataatccacgaagttacagtggttattttgcaaggcgttgtacaccttgcagtatccgtcattttctcttttacgcgccatttccaacggcg

SEQ ID NO: 51 - DNA, 132 bp, Cronobacter sakazakii
tgccagcgcgtagaaccgtacgtcaggcgaggcgatgaccagcgggtgctgatgtgcctgcgcgtcaagtgtggtatcgctgcaccacaccggctcattttgggggcataacggctgcgttaagactgccgc

SEQ ID NO: 52 - DNA, 235 bp, Cronobacter sakazakii
ccgcgtactgataacgaaatctgaacgcccttctcacgtccattccaaagccagcgcgtctggctttttttatgcctcttgcaaacgataagccctgccattcgccgccattttattctgaaaagctttttctctaggcgctgacgctgaagcagatttgttggatcgtattaagtatgttgtaactaaagcagctgattatcgttcggttaagcctttacgcccggttttttcg

SEQ ID NO: 53 - DNA, 179 bp, Cronobacter sakazakii
ctatggcctgaaggaagaataaaaccggaacgcgcaagagaacgtagataaaacacctggaaatagcaggtgtaccgccaggaaacgcgcgacaacccgagtgacagtgcctgaatccggtttacatattgtcgtaaaaaggccgcccggaggcacaaacaggatattgccagcttccg

SEQ ID NO: 54 - DNA, 147 bp, Cronobacter sakazakii
agcacaggtaaccgccctgtggccttaacgcttgcgtaaacggctgacgctgaaggccagcgccagcagcgaggtcgcagcggcgatccacagcgcgagacgcacgcctgcgacctcggcgataccactggcagacgttgcccctac

SEQ ID NO: 55 - DNA, 190 bp, Cronobacter sakazakii
gacagccattaattaatgaataaaaaataaacacctacacctgaaatcttatgtgaataatgatttttaggattaatgcataaacgataatagatattccgaaacgttttgggttgatgaatatattttgagcgtgttgttttataattgcgagcgcattcacaagacagttgtacaataacgacgcgcc

SEQ ID NO: 56 - DNA, 193 bp, Cronobacter sakazakii
agcgccttgatttggcatatttcattagtccgctaagggatgtcaggcgaaaatacctggttctgtcagggataattttatcagggcattgagactggctgagaagcagggaaatagcgtcgtcggatcattatcctgataagaatgaacttaccggtgcgcacgagggtgcataaaaaatgtaagaaacatt

SEQ ID NO: 57 - DNA, 104 bp, Cronobacter sakazakii
ctacagcacactgataaaaaaggcttttcattaaacacgctgcaaaggcaatagacacacaatgctaaaggaagctgaaagtaacgcattaaaaaaggctggca

SEQ ID NO: 58 - DNA, 136 bp, Cronobacter sakazakii
tccacagggtcgacgttcgtcggccctgcgtttttcttattaaataacccgcaattaaagtgccgctgaacttttatgtcagcgtcacttaatcaagtgaaactattgagccataatatgtagtaaagctgaggct

SEQ ID NO: 59 - DNA, 183 bp, Cronobacter sakazakii
tcactacgccgcgccgcgctcgctttcaggactgcataagacgcgtctcatcccactggcactattttcatgttaaaaaagagattatttacgggcatatgcttcaggaaaaacgcatgtctgccgatctctcccaaatgggcggtgcccgcgtgacgctcacggcggataaaacaggccgcg

SEQ ID NO: 60 - DNA, 122 bp, Cronobacter sakazakii
gcgcaggcatttgtgcagatggccgggcgttactgccgcttctcatctcattacccggtgagtgaactcgcgcgcgaaatcgccatcgctaaagcctggattgttaccgaggtggtcatact

SEQ ID NO: 61 - DNA, 211 bp, Cronobacter sakazakii
aatcagtcggtcaggctgctgtaaaaaatacgctgttataaatagtcataccagggctcaaaggccgtcatcgcgaataaaataaaaatgcaggttaatcagtggagcgggctaaaagttgccgacgccctgctgctggatctttcattaccgggcgcgcggtcttgtaaaattcatcatcaggcgcctccagttgtaatatcgctgcccc

SEQ ID NO: 62 - DNA, 266 bp, Cronobacter sakazakii
tgttgcccggaatggttgccccatttcacctgcgccataccgttctgtttgacgccggacagatacaccacgccgccctcatccaccatactttcatagttttcaatactctccagcgtgaccagcgcgccaaacggcacaggctgaccgttggcctgtcgcagggtcagcaacacccgagatcctttacgcgcgtcaaaacgggcataaaccagtgcgcctttgttcgggataagcgtcatgtgcgtgttgtcggcatcgacacc

SEQ ID NO: 63 - DNA, 145 bp, Cronobacter sakazakii
acaaatcatatggcagcgtaacctgtcgggcagcgagcagcccccaacaaaagaaaagcagcgtcagcgccagaaaccgcacagcggaatgtcgcaaaaacagcattaacgtcgatgcaattgtgatgacggctatctgcgcgac

SEQ ID NO: 64 - DNA, 105 bp, Cronobacter sakazakii
ctctggcgcgtactggccaccctgcggctgtgcataaggatcatgcggtggttgctgatatgcctgcgtaggagagggctgcgcctgatacggctgcggctgatg

SEQ ID NO: 65 - DNA, 161 bp, Cronobacter sakazakii
acaatatcgcatcagcgcgctttgcctgggcacctggatggcgctcggaatggtgacttacgcgaatgccgccattgtggtcgatcaacaaaaatcgcctgataccacggtcaatgttgcgggtaatggtgcgacagtcgttgatgtgagcgccccttcca

SEQ ID NO: 66 - DNA, 232 bp, Cronobacter sakazakii
aggtttatttaccgagggagggacaatcgccggtaacactgttacggtcagcagtgggtatttcaataatgacaaagggacagtgaaaggtaataagatctatctgcagggcgatacgtttgatatcggtaacggtcatattgcggcaaccggcgatattacggttaacgcggatgacgatttctatgtcaataaccacggctccgtggaatcgaaagcaggaaatattaac

SEQ ID NO: 67 - DNA, 160 bp, Cronobacter sakazakii
tctgtcaggcgtttttttcagacccttctcccctgccccaccgcgctgaaaacgtattaacccctattgcgaaataatgcgcgtcaataaccacgccctgtgccgccccctaacgtaaattccgtccatcctgcgctttcacgccattctctttgcacta

SEQ ID NO: 68 - DNA, 473 bp, Cronobacter sakazakii
ggctgtaaagagcagcgtttccgatgcgcctgcgccgccgggattcgccggatcggtaaaatagctgtagcgccgttccgcatcataggtgcgctgagacgtgagcagcgggatcggcgtgccgatggggagacccgctttcccgctgtcgtagccgccagacgcgagtttcagattcaactgaacgccgaggccggtcgccacgtctgacgcgccggtatccgagagcgcgataaccgtattattcgccgtgtcgccgccagcctgaggcgcctggacttccagcgtgacgttggtgcccggttcgcacgagagcgtgaccgttttttgcgcctcgcccacctgtgagttgttatcaaacgctgccgcgtcgatatcacccatcacaaaattcagcgaggccgtgtctgcggtgcatcccatcgcctttacatccactgcagaggaagagacatcaagctgcgaggcgatat

SEQ ID NO: 69 - DNA, 780 bp, Cronobacter sakazakii
gccattgcgccagtcgttatcaatagtggtttcatcgtcatacggcccggcctggttgagggtaaatacacgcaccccaacgccgtccaggttcgtggggtaaatatgcccgcccagcgagtcgcccgtttgtggcgcattcagatagataaagccaacaaaatagcccatgttacagttatgtatcgtcactttatcatcgctacccgcaatataaccggagtcatataacaccgtatcttgcgcataagagccactttccaccacgatatgctccggcaaatgcaccgacgagacggaaatatcgtcactgcggtcacgctggcacgcggcgtgggtggtggtagaaagaagcgagaaaaaaagcatgaacatcaaaacaggccagcgcatatcaaactcttaagcgttattcagtgaaggttacgggtaaataaaattaatcgtgacggaactgctgaaatccccggcggtgggtttccccagcggcgagtacatgcgggcaatgaggcttaacatgccgctatgggtatcggccttaatgggcacgctgtaactgacaccgttggcgagattcaccagcggtttgccgtcgaaattaattaattgcagcccaagatcgcccgcgccattttccgcctgattcgcgtaaatcgcggttcccatcgcaccattgtcataaggctgaccgctgaactgtgccgtcgcttcgctcaggccagccgtacagccggttaacttaacgagcacaggaatgctggcgctattggcaccggcgat

SEQ ID NO: 70 - DNA, 254 bp, Cronobacter sakazakii
gccccggtacgggaaccagtgcgttgctgataaacagcgctaacgccattcgacgccagcggccagaaaaaacgccgcgcaaccacgacttcatcatttgttcactcccgtgaaagaggcggtgcttactcacacgccgcctgctgaaaaataatcccgccagcggttgaagccggttgcagcgtatagtcaacccgacactgctgcgcgctctccgccccccacctgacctgcaactgccctttcgggctcag

SEQ ID NO: 71 - DNA, 540 bp, Cronobacter sakazakii
aagcccgctgtcatcgagcgaaatcgcattctcgtgatacgggcgaacataaggcacgacggcgttgccgtgagcatcggtgtggacattgttctgcccattgaccggaatatccttcgcgccaggtgccgtgacgatcgcgacactctcatttagcgttcgggagaacgtcaggccatcggcgtgcgcgaccattccgccccgcagcgcatagttatagcggctggtaaaattgtcataaccgtagccgccggacatttcgccccatgaattctgatagttaagactgacgttgccgttcgttttcttattggtggcgttatagccttcctgcacctgccagttgaggctattgccggcaagcgccgaaccgctcatgccaaggctgtgcattgtggcgccgtgcgcgctgctgttcatggcgtagttcattgaggcggaggcgagttctcccttatggtcgaacgcactgaagggcacattgacagtcaacgcaataaggctatcgttggttcgcttagtgtcatcgctgccggtaac

SEQ ID NO: 72 - DNA, 488 bp, Cronobacter sakazakii
taacgaaagcgagcccactttggtactttgcgataacgtgacgtcaaagcggtgctgcgcatgatcggtgttatcgatctcttcagcggtgtcgcgggcgttaatcagatcctgaaaagagtaaaagccgcgcgtcgcgtagcgataactggcgacggaaatatccgtgccggtttcctgcaacgttttgctatagcgcatacgccaggcctgcccggtactgcttttcatattgccgggggttaatcgatcggcgagttgcgctttggcctgtgtcacatctaccgacagcgcgccgaaattcccgagattcgcgccaatccccagcgcatagctggagtagatatcctgcgcctgagtgatacccccgtagaacgtgagcgcgttggatagcccccaggccgcgtcagactggataaaatccagcgcgttttttgcatcgccatcgttgcgggtcgtgccggcaaccagcgaatacgttaactgat

SEQ ID NO: 73 - DNA, 337 bp, Cronobacter sakazakii
gagggttgcccctcctttgattactggtaactgatgctgtacgttaatgtgctaaccacattccctttcgtgacgccggtgccggtcgccaccagttgcgcggtataatccacagtgacgtcgccgccttccgccggtaacgtaatatccgtattaccgtcgttcacatataccgtgtcggtgccatactgtttcaaaagcacgccaacatttgtcgcggcatcggtcgtggcgatgtttttgaaataactgtcatcgccatcggtttcgccgttaaatttaatattggctttcgcaggactgcctgccgggcaggaagaaagggtgatggtaaaaa

SEQ ID NO: 74 - DNA, 478 bp, Cronobacter sakazakii
ttcaacagtggaactgccgtcgcctactgttaccgtacaggcggcatcaagcacttttccgttgaatgtgatggtttggctattggcgagcgccgcttcagaagcacacagcgctgcaagcacggcaataacaccgcaaccgcctttcgttaattgcatcatgatttgatttattcctttagataaattaacaaagcattcccgtgactttattaattccattcgcattactaaatcgagaattaactcctttttactctcattgttgaatggcggtatttcccgacctgaaaagccgtgataaaaccggccattattattacaccactctgatccatataaattcaggagggaaataatattcacgcatagtaataatcatggggggattcatacaattaacgaatacttaaagagagttttactggcgtcttcagaaccggcgttccggccagaatcaaagatatagaagagattt

SEQ ID NO: 75 - DNA, 203 bp, Cronobacter sakazakii
acattacatattcagaacaggccaggtgatgcgcagcaaaaagacaccgacaatcgctactacatacgcgcaccagagagagataaccacgctggcgatatggcctgccacaagcaataacttaggtatcattgcacacctctgtcattaaggtgaacctgaagcaaaagttacaaagaagcatcgagttttaataatggcaa

SEQ ID NO: 76 - DNA, 339 bp, Cronobacter sakazakii
caccggtgtcaggcaggtaaatcgtgcaggctcagggcgcggatgaggaaaaagcgtagcgcgttatttcaggcagcgcggaactggccccaaaatacgcttagcgtactcaggagaatatattcgtactctgcgttaaaaaaggcgggaataacgtaacgatgaaataaggaaaaagtattacgctcgaatgaggtcaggcaaaacgtattatctgcgggctggtgtagcgacggaagaataaaaacaggaatatccgcaggcattgcgtttattccggcagtaaaacgtcagcggtgccgaaaaaagtgcctgcggatgagacagagcgtcagtgtt

SEQ ID NO: 77 - DNA, 150 bp, Cronobacter sakazakii
ccgacagtcgttgcaggcgcgcgcccagcgtagcaactatcgcggttacgatatcaaacccgaaagcgcacggctggccagacacgcgcataacgcgtcggaacgccctttccatgacgcgacacaacatgcgccttatcacgatctgca

SEQ ID NO: 78 - DNA, 154 bp, Cronobacter sakazakii
atcgaaagccggcatctggcggcagcccaccgcccggacacgccggtaagagagcggcacattgagcatcgtcagcatgagcgccatcactaagaaggagaaaaaggtgaaatcgacatttctcgccgcgctggcgttcgggttgtccgcatcg

SEQ ID NO: 79 - DNA, 121 bp, Cronobacter sakazakii
tgctttgaattattcacgctcaaatgtcatcacatcctcactcgcgcttttaattcattgatatgataaataatctaacgcaattaagccgataaaaaggaactaaaaatgcgcatccgaa

SEQ ID NO: 80 - DNA, 3625 bp, Cronobacter sakazakii
ttacgccaccgaacacaacacaatgctggtcatgtgccattacctgacgctctacggcaacatgatcatgaagtttatgtacccggtctttgccgcctatatggcatggagcattgccgaccgaccaggcctggtgcccggtttcgttggcggtgcctttgccggcgggctgcattacaccttctgggcggttaacggcggcattccttccggctttctcggcgctcttattctgggcgcgcttgccgggttcatcgcaaactttctgaatcaacatatccgcctgcataagcacttacaggccatgaagccgatgttgatcgtgccgggtttatcggtcctcgcgatcttctttatcaacttctattttgtcgatccggtttttggcggcatcaataaatttcttcagcagtttattaccgagcacggtgcctccagcgcgttaatgctggctgtcattatcgccgcgctgaccgcctttgatttaggggggcctgtgaataaatccgcaggtgccatcgccatcgggctggcggctgaccatattttcccgctgacagcgcgcgtgctgggaatcgttattccccctattggtctgggccttgcgacggttatcgatcgtttcctcgtcaggcggcgagtgtttgacgaaaaccaacgtgtcaccggcactacctcgctaatccttgggttcctggcgatcggcgaaggcgctatcccttttatgctcagaaatccggtgattaccatctcgattaacattacaggcgccattatcggcgcagtgacggccattaccttaggctcagtgcagtggttcccgctgcctgccatctggggttggccactggtgcaaaatcttcccgcttatctctttgggatgtttctcggcgtagcgtttatcgcttttgctaacgtttttgtccgctattacctgataaccacaggcaagcttaagctgaactgacagggaggttgtttttaatggtcaacaaaaaggtgtatgtcgttccccactgtcattgggacgctgaatggtattttacctgcgaggactcacatattctgctggtcgagaatatggattatttgctggatctgctggaaaaagatgcggattttccaagctatacgtttgacggcctggcgatcgtgctcgatgactacctcaaagaacgcccggaaaatacatcgcgcattcatgcgttgatacgtcagcggcggctttttgtgggtccctggtatacacaatgcgactcgttgctgatacgcacggagtcactaatccgtaatttgcagtacggcattcgcaccgcgacacagtttggccattcaatgaatgttggttatttaccggatattttcggccagcatgcctggttgcccgccttttttacggacgccggtatcgatttctgcgttctgcaaagagggatttatacggatcagcttcgtggcgatctcaatttttactggcgggcaccaaaccagaaatccatcgccaccaactatctctattatggttatgggccaggtaagtttttgtccgctgaacctgattatttacagcaccgcctcctgcctattcttgaacagttgagcgtgatgaaccgccataccgataagctgctcttaccctgtggcggcgatcaggtgttgcccaacgcccagtatccacaaacggtaaacgccttaaaccagcgcggattgccttatcagttcgttatggctgactatgagagctatatgcgtgaaacctggcgtgacggtgaatttacccacgtgattgagggggagctgttcgcctgtcagaaatcccgcattcaccgaacctgccactcaacgcgttatgacattaaacgccagacctgggaaaccgagcatctgctgatcgataagcttgaaccgctcaccgttatggcttcattactgggtattcactggccgcaaccgttaatggcctcgctctggaaaaccctgttttgcgcacatgctcataacggtattgaggcgaccaatgccgacccagtcaatcagaacattaaacagcgactcatcagcgtggagcgctctgcgctgagcctgattaatctgctgaaaaagaaaatcagccacgccattagtctgcagtccgagcaacgcaatattctggtggtttttaacagtgatattagcccgctggatagcctggttcaggctgttgtgttcacgaaagataaacaggtttcgctgcgacgtggtggcaaccccgtcgcctgtacggtactggaacaacgaaaactggatggcggccagcaggtcatcgtgaccgcgcagggcgaaaagctggaaacggtggaaggctattatcgcagcgttattcttttcagggctgatggccttcacgggctgggttatcagacatggctcattgatgaacaaacggcgagcccgtcactgaccctgagccacgaagaggccattgaaaatgcacgcttgcgaatctcacttcatcagggcgttctctcgctggaaaaccgcggtaccggccaacgtatcgacaatcttctgaccttcgttgactgcggggatgatggcgatgaattcgattttgcgcctgtggagcatgagcagcctgtaagcatcagcacctttacgcttatagcctgcgaaacgagcccgatggtgtcgcgcatgacgctgaaaacgacgcttgtgctgcccaaagatatgcagcaacgacggaatgcagcaccgacacagcccatgaccatccaaacgacgctggaactccgccagcatgaaaactatgtgcgtgtgcagcatcatctggtcaacgaggctcatgaccatcgtcttcgcgtgcatatcagaacaccggtgaaagcccccgattacgcctttgccgatcagggctacgccttactgcgtcgcgagacccggagccgttacgtaaacggctggcgagagcaaggctttgttgagaaacccgtgcctgtttacaccctggaaaactgcgtggcgttacgcgatgacaaccatctcttcgcggcaatcactcaaggcatcaaagagtatgaagttttaccggacgaagacgtactggcgctgacgttatttcgaagcgtcggcttgcttggaaaagatgatacgccgtggcgacctggccgggcgtcaggcatcaataataaaatcgtcgacacaccggatgctcaaatgctgcagccgatgacgtttgattatgcgctgatgatggatagcggaatcgacgatgccgccttatttaatgcgtgcaaacagtatcgtgagcactatctgagctatcaattgcaacagctcaatacctttgaagaacgcctggagcgtttcactatcccgctaccggaaaaaggcctcgccccggcgttcacctggctcatacagaataatccagccattcagatgagcatgtgtaagcccggcgatggcgaacataccgttatcatcaggttgttcaaccctggcgacacgccgcaaaccgtcgagctcgcttctccttttacctgcagaatttatcggctgtcactgctggaagaaattcaggaaacggtgaaagacaacccgactatcgccgcgaaagactatctgacgctggccatacacctta

SEQ ID NO: 81 - DNA, 135 bp, Cronobacter sakazakii
ggcatacagatcgtttaaaacgaattattggaaatgacatcgggtaaatggcaggcaaaaaaagccccggtaatccatccccggggccagaggtccgctcaaacacgggcagagcggcaaatatcatcgtgacgt

SEQ ID NO: 82 - DNA, 133 bp, Cronobacter sakazakii
atcactgtattcaaccagttgaaactcaatatatcatacattaaagattaaactgccgttaattccaacttaaaagagatttaaaaagccaggggaatcgtgatccgtattagcgtttcgctaaataacaacg

SEQ ID NO: 83 - DNA, 240 bp, Cronobacter sakazakii
tcctggcgccggtaggggaaggtacaaaatataagcttcgacggctgctggcaaaatcaatttatatcctctacaacgtccttatctaaaatggcggcgcaagccacactatttgttcctgagccaccagactggtgcaagacaatgttaatatccgcttcgctgttatttattatgattaagtaaaaactgagtataaaaaaagcctgaaacggcaaataccgtttcaggctcatccat

SEQ ID NO: 84 - DNA, 232 bp, Cronobacter sakazakii
aaagacgacggcaataaaggccgtcacaaaaaagtttttaatagccccgctgttattttgagcgtcacttttttgcgagtaatgcacgatagcaggcaaaaatgccagtaaggagaacaggctgataaacacccatgcgaataccacagcccatgaaccttcaccgcggctggagtgaataagaaagcccgcaggtatcgatatggataatcctggtaacaggataaaaaac

SEQ ID NO: 85 - DNA, 386 bp, Cronobacter sakazakii
ccatttgccaggtttcagggggcgaagaagaaaaccgaagttgaaacagataaccagtaaggttgcgaagagggcagtaatgagcagtattttttcaacgctaaagacatagtcccccgtcagttttttcacaagcgttgtgtgcggcagaaagacaagcgtcagataaaaaaacgagacagaaaagcagatccacggcaatcctttattaaaataacgctcaggatcgccaggattaatttcgcggtgtgccagtaaaatcgcactgggcagcaccagcgtaagtgccgtcgccagtgaaaacacggcagcggagatcagaagcgagaccagaccgatattaaaagaaaacgcccccatcagaagatcgagccgtccaatactcg

SEQ ID NO: 86 - DNA, 173 bp, Cronobacter sakazakii
gtaggtgtttgttttatcagcgagaaaatgaaaaaagacggcaccatcacgtttcgtttacctcacaaacaggcacagcagcaccataattatttgctttattcctgagcttcaaaaataaacgcgcgccataactgcataatcatcttttttaaaaaataaaacgcttaatt

SEQ ID NO: 87 - DNA, 154 bp, Cronobacter sakazakii
atgtttcatccggtcgtacgcatgtcaggccgcctgtaaccgtcaccgttagcgtctcgccattgagcctcagcggacgccgaccaggagagccgcagaaccgtaaccccgcctcacgcgcggcttgcgacgtatgtgcgtcaagcagcacgat

SEQ ID NO: 88 - DNA, 916 bp, Cronobacter sakazakii
ttttattttgtgtagtcatcacaggccagcatgcacagagcgactggcaaataccgttgattacaggtaaaccagagagaacgttgttgatccctggaaatccagctcatccgtcacgctatccgcaacagacttttcaaagtaataggtggtatccatttttaaattaaacgtcttaccacttttaggcgtcagctcatcctgattcgcaaaagagtaaagcgtattaatatggtttaaggcgcgagccttactccagttctgcccatcattgccagaataaatcagatttgctgccgccccgtcgatcgtttctgcgttttcatataactgatacaagccaatcgctttatcatcagcggttttgccaaaaccgtatgcaccgctataatcggtcaccagtgaagcaggaatggtaccttcgttattatcggtaatggtaaaaccaaccgccgtgtctgcagtacaggtaatggttaaatccattttcttatgctggacagaaacagcctcataggccttgtcattatcggtagttgtcatattaccaataggaatatgaccaagatcaatcacgccaccattttcaaacgttggattacaggcggttaaagtcaacgtgcccgttacttttaaatcgacgctgtcgctggcataggcattcataccaaaagccatcatcagcgcactggctaagactaacttcttcatttttactccttaataaaattacagataaaccagagagaacgttgccgagccctggaaatccatttcatctactacgctttctacaacagacttttcaaagtaataagctgtatcaaattttaatgtaaattctttgccgctcttaggaacaacttcatccttattggcaaaagaatagataacattaatatggttcaatgcgcgg

SEQ ID NO: 89 - DNA, 982 bp, Cronobacter sakazakii
ggcatcttttaccactggcagattagccggatgaataagcacaggaatatcctgacgaatattaaaaccaactttattttttcctggcattttttgaggaataccttcaaacgtaacacgtttgagatgttccgttttcatcggcgaggcggtctggagaataaaacgcaaatgctgtgtttgtccgccttcgacacgaattaccggttgagtgacgaccagatggccttctttatcgtcaggcaggtcaacaatattggtatacagcaactctggtttatcatcggtatttttaatattaatactgccgccctgatcggcttcattaataattaacaatgacgtttcaggtaccattccggctgcctgagaagtagcggcgtggccaagcgccattgcgacaatggataataagaacaagcctttttgcagtttcatgaatcacctttatgtaatattaaacccaaagacgctcagcacgtcccgcttaagttgctgacatgattaccggattgtgtcgccgccacaatttcagaaaatttaaatacgctttaagatttattcattcatgatatttattaattaagcccatcaaaaacagcagattacagatacattaccgtgatcgttgcagagccagtgagtgaggtgtcatcgctaatgttcagcgtattggtggcctgaacggcagcagtgattttcagaggccagacaaaggtctgagcgctgacgatagtggcatccgttgctccgctcgcttctgcggcatagatatagctactgtcgtttttgatttcacccgcccccgaagcataccaactaccagaccctggcttatataacatactgattttattgccatccgctgttacgttacttttatcgacataaatggcgtaagccccgatattcacgcccgcagccgtctttcctaagccaaactcgtaactggcatcggataaatcttcgccattaaattttg

SEQ ID NO: 90 - DNA, 352 bp, Cronobacter sakazakii
gcctgcacactgtcttttttattatccgtaataaaccagccaacgggcgtagattcagaacaggcaatagttaacgtcagaaaccgggagcctaactgattcgtttgcgtttcacttaaatttcccaccgggatatggccaaatttcgcttcgccgccatcggataatgtgggtgtacaggctgccgcctcaagcgtcgcggtaactttaagatccacgctatcgctggcatatgacacgccggatagcacagacaaaaagcccgccagcagcgtaataattttgaacatgtttttccctctgcgataatatgacatagcgagcaggctaacagacgcgcaatttaactgcg

SEQ ID NO: 91 - DNA, 721 bp, Cronobacter sakazakii
attgaatcacatcccgcttttagatatatctcaacgtaaaggttgttgaaccagaaaaagcctgtgagtcgctaattttgtctgccatcgcttttgagaacgctacctgaacatccagcggaattgtcgccgtggtcagcggctcaggcgtggatgcgccttttttcgccacggtataataatcattaggcgatgcagtcagcccggtagtgccgctattccaggtagagccgctattggtagaataaagcactgaggcctcttcaccgttgaccgacgccggtttcttgttagcaaaaaccgtgtagacaccaatcttgtcacccgcctcggttttgcccaggccaaaaacaccgaccgcgctattcaccgaaattctggaatccggattattatccgttgtcataaaggcaacaggcatcgccgtgccacaggtgagcgacagcgttgcatcatagtgctgcgtccagtaagcattttcgctttcgctatacgtcaaattttttaccggaatggtgcctacgttaatctcatttttatcgagcgaaatatcgcacgcgccgttaaccagcgtaccttttactttcagctcgacagaatctgccgcatgcgcagcacctgccagcgctgtcattacgacgcctgccagaactattttgttaaacatggttttttccataaacactaacaacagattgatacaattgcgccattcataaat

SEQ ID NO: 92 - DNA, 601 bp, Cronobacter sakazakii
tagtggcagagccatccaggttggtgttatctgtaatcgcaaggacatccgtgccctgaatagctgcagacacaattaacgggaaagtaaagtttttacccgctttaggaataacagtccccgagtcagcaatcgtcaaataacggtcatcgggagaaaagttacgcacagacccatctcccgttttgctccagtcatttgcggcattacccaggtttttataaatgacatcgccagacgtgccatcgatagtcgcttcaggaacattgataccgacgcaataagcaccaatatttacatttcctgctgttttgcctaaaccgaacttattcgaccccgcggtacaattactgccattataaaacgcgctattaactgtcaaatcaaccatagattcgctccgattatcttttacatcaaaagcaaccggcatttctgaatcgcaggtgatagttaatactatcttcttttgccccaaagaattcgtttcagttttagaaagattacccagcggaatatgcccaaaatcaaccacgccaccattttccagcgatggcgtacagctgccattcaccagcgtacctttcacattaagatcaac

SEQ ID NO: 93 - DNA, 661 bp, Cronobacter sakazakii
gtaccctgaatggcagcagcgaccttaattggccaggtagtaactttcgcgggtaaaacggtgccatcagaagaagattcagcttcaacactgtaaacacggctgctattactttttacttcgccagcgcctgaaactacccatttagtcttatccgtcggatcaccgtcggtatacatcatcttggcattaacaccgtctgccaggacattgcctttatccacatagacagaataagcaccgatttttacaccgcctgcggttttacctaaaccgaattcatactcagcgccagtgacatctgaaccgtcccatttaccatttttaatggttaatacttgtacgctatcatttctgttatcaaccatggtccatccgagaggcatggctgagtcacacgtgatggtcagaactaacgaactacggcctcccagctggtttgtatcggttttacttaaattgcccaatggtgtatgcccaaagtcaactacgccattgccagataatgttggcgtgcagctgccattgaccaacgtaccttttacattaagatccacagaatcggttgcgtgcgctgcgctaaccattgccatcaggccagccccaattaataatgtcttattaaacactgttaatttccttgcctattacgtattaatac

SEQ ID NO: 94 - DNA, 147 bp, Cronobacter sakazakii
ttatgcctggagcgcgctgcgatgaagctttaagacgacctttttgatttctgctggctgcctgatactgcacccgggtttatgcggctcacccggcataaaaacgataaacatgccaggctccatgataatggtctgctctgcctc

SEQ ID NO: 95 - DNA, 279 bp, Cronobacter sakazakii
ggttgccacgccttctgaaagcgtgatgagctgaaaagcgcggcctgtccgcgcttttttatttctctcacggtctgacatgctgatagtttatcggcacgcagtgttgttcacagggagccgcgcgccgtcaaacgggtaatgattcaccacatcaatatgcaatggagagcattacttcaacccacacaggaagcagaataattcactacgggtgaaaaccttcacatcccttttccccagcgccgatgcccttcacagaacgattcaccatgccaa

SEQ ID NO: 96 - DNA, 156 bp, Cronobacter sakazakii
ttggtgggtggtcaggctaagaaacaaaacgccagctcgttctttaatgggtaaaggcgacgtattgctctctcttttgcgtcaaaagtgctgctgatttaagcattacaattactgctttaatcgtctcgttcgccgttgagtgttatctcagta

SEQ ID NO: 97 - DNA, 224 bp, Cronobacter sakazakii
tctgctttcgctggccatgtttctcattgggtttgggctggcctggctgcgtgatttcggcgcggacagcatgccgttcatgaaattcggctggggttttcaggtaataatgacgctgctcttactggccgccccgtcgcatcaaacagtgacaaagaccacataatatcgggcggcatcgtcgcccgaatcaacgactatttcaggcgtaaaggagccttact

SEQ ID NO: 98 - DNA, 186 bp, Cronobacter sakazakii
tggcgccacgccgttctgcaactgcactgtatgctgtgtggaaacctgattaccggcgtcatcgcgcgacgtaatatcgagcgtatagctcccttcgggctgggccagggcatcgggtgagatcgccacgctccagctaccatcgccaagcaccgtcgttgtcagcgtgacgctgccaaagaggac

SEQ ID NO: 99 - DNA, 132 bp, Cronobacter sakazakii
ggtaagagctacctcggtatcaaccgtgaccgtgctccccgccacgccgcggttacccgccgcgtcactggcgctgacggaaatgggcacatcgccctgaggcagcgcctgcacattcgccgccggtatcgt

SEQ ID NO: 100 - DNA, 367 bp, Cronobacter sakazakii
tataaaattccgccctggacggttaatggattcgttatcattagagcgtcagggcaatgctaataagcaacgttattaaccgcgttacgatgatggtggcattataaaaagcccacttccaacaacaatagacgaacctataacaggttcgatgattagatacagtcacgctaaaaaagatctttaaaaataacggcatgaaaaataccgagccaatttcctaaataccaggaaatcacaacccttattaatcataaaaaaataaaacacagcagaattaacactgaatgcacgggcaataacgcgcaaatttaaaaatattaacgcaccagcaaaagcatattatttttattctgaatagaagtca

SEQ ID NO: 101 - DNA, 143 bp, Cronobacter sakazakii
tacacaaatagcgacgaatcatttcgttaaaataaacaaccggttccggtgataaacggaaccgagatgttgacgattcgcactgacaaaataagtcgttatgccacgacagacatgacggttatgcgcgacgacgcgggctg

SEQ ID NO: 102 - DNA, 183 bp, Cronobacter sakazakii
ccagcaataataatatgcaggctaagcgtcataaatagcagtgacgggtttaaaacgcctgcccgcaaaggtaaaaagcacggtgatttagcttaagaaaaaataacctgtacaatgcatatttctcttgtacaggtttataaaaaccctgaaatatatattttgtaacactctggttagcgc

SEQ ID NO: 103 - DNA, 126 bp, Cronobacter sakazakii
taaattaatatttatttcaaacatataacaccatgcccacgcgaatcattttatccgatcttagcggctgaagcggtgggcgaggatttttttaagcgcgaggggatctgcttcacaattttgcca

SEQ ID NO: 104 - DNA, 117 bp, Cronobacter sakazakii
ccatcagcaatagctatttgcctttataatgttaagcgtttgatttaaaagaactactaacgagaaaacgtaacgcgttaacggagtaaaggggcaggataatgcggagcgggcatc

SEQ ID NO: 105 - DNA, 242 bp, Cronobacter sakazakii
aacccttgcttcagagtgccttgcccggggtgtcgtctttatacaagaaggtagagagcgttccgggaaaatcgcttgctcttaatgctttaaggcggtgtattttcttaatctgctgccagattacttacattatgcattggaagtcaggcacttccggccatcagttgtcagccagtataactgttttatatgctgcagttgctgacctaaaaattaaacgaatttattaggtgcaactt

SEQ ID NO: 106 - DNA, 481 bp, Cronobacter sakazakii
acagacgttcaatttcaatcgttaaggaacccgctacgtcacccgcaacggctttctgaccattcagtttaaccatattgatggccagaatgtcgccgcctacgttagacgttgcagccatggtgtcctggttaattttgattggcgtgtgattaaccgtaaacaggccgatgcctacacctgtcgctgcgccagtggaaacattgccattggccagtacggtgccgtcagcgtcatctgcagtaccggtgaatttatatgccatttttccctgagcaacctgatcctggcattcgctcccgccattaatagacagacgaacggttttcacaccggccgcattgatcagcgttgcatcgccctggttgaccaggtcagctacatcgctttcaaggttaatgctgttggtagaaaggtttacggaacactgatcagaaatactttctacaactgtaccggttacgctcagtgtcgcggaaac

SEQ ID NO: 107 - DNA, 342 bp, Cronobacter sakazakii
atgaatgtgttgtgttatgtggttatggatttaatctttattttctgaaagcggacaggcaaaattctcatttttatctctcttttcccgcttgcagaataatataaatgaagtgatacatataatagatatatggttatgcacttatataagattttaaatgtgaattattaaaaagtgattttatgcattcaatgaatgctcacagggcttttattgagaaagaataggttccgtcttggcggcagcgacaacaagctgaaggggtaaacatataaaattccagagcatagaaccgaaaaacggataaaattagcgatgataaaagtacaagtcacttca

SEQ ID NO: 108 - DNA, 122 bp, Cronobacter sakazakii
cgtgcatggcagacctgttttgcgctgccagtattcaacgacgcgccagtagcgcttgccgcaggacgcacgcgccatcctgtcgcccatactggtgtgcaaaagctcaacgatgccacttc

SEQ ID NO: 109 - DNA, 123 bp, Cronobacter sakazakii
aaacgtacagacaatttattcctgtgcgcgttcggcatgttatttattagtgcctgttgttattaaaatgaaaaatgtaaccgcgcacatgttggcgtttatttccggatgtgaggtttttta

SEQ ID NO: 110 - DNA, 109 bp, Cronobacter sakazakii
gagatcgctcggcgcgcagcttggcatacaagcacaggaaatcgcgctgtgcggtgcatcctggcaagagggtgactggcaggcgtttgatccgtggcaggttatcacc

SEQ ID NO: 111 - DNA, 127 bp, Cronobacter sakazakii
aaggttgtcaggtagaagaccgtcacgcacatcttttaccaccagccctgcattcaacagcatatacgctgaaatccatatcgcgatcattcttcttccctgagtgcgccttcaatgaactcataac

SEQ ID NO: 112 - DNA, 110 bp, Cronobacter sakazakii
actgccgcgcagtttgccggcgcggcggataagcacgaaagagaactggtcagacggctccagacggccgatgaccatcacgggatgttcggtaaaaatgccggtggaga

SEQ ID NO: 113 - DNA, 1082 bp, Cronobacter sakazakii
cattgcacgccagcagcgtcacgcccgcgatcgcgcggatgatcccgataccgaacccgacaacgtgcataactggcatccgcgattaccggcgacgcctgctgactttcctgaaaaggtgacgttcctgctcactcgcgatgaggctgagttcatccgcgaccgtctccaggcggcatgtccgcatagcctgctggcctttctggccttacaggacgataagccgacaggcgcgtatccctgggagtatgccaatagcggtcgcttttccgcgacacatcagacgatccttcaccatgcacgccttttctcggaagtcatgcatggcgcggcgctctcctataactaccagcttgccgaaaagatcgagcgtgaggggctgcgtgaactgcatgaagagaatttccaggaatggcgcaatgctctgccgcttgcggagattgcacgctggaacataaacgagttgtgggcgcttactcaccgggaaggccatcagatagctccgcagacacgccattttatcgaatcctgggtgcggtatcttcgcacgacgccagacgcgcttctgaagggcgatgccagcgcgctgattcagtatcgtgaacaaaaattaaaaggaccgcgctcgcggttcactaacaagcgcgcgcaggagcaatggcgcggtcactcgggtacgagacggatcaattatcgctggaataccgttaaaacgttgctcgctgatttgcaccaggggctgtgtcaggaggcggtatgctgagcccggatgcaagaagcctctataccgccgcgctgacgccaccgccgggtatgcgttttgatgaagcgctggccacgacattttcactggatcctacctgtctgctcgaagcgccggtgcatcttgcactgatgtccatggaaaaccaggcggaacaggacggccttgccatgcttgaatccctgcgacgttatgccggacgcatgacggtctatgttcagcgcggacgcattcagttgcctgccatagtgcgacccaatccgttatttagtctgcttgagccgatgattgtcgaagtgagcgcgcccaacggcggtgt

SEQ ID NO: 114 - DNA, 197 bp, Cronobacter sakazakii
ggtttgcgaaagccagcgcggacgaccgtctgaccggtatgccagtcatggcatggctgatgccctcaccggtcctggcgacggcgattgatccactcacgatggcctgtgccggggataacggcccgctcccgctggaaaccgtgctggaagccgcccgtgacatctgcgagacgcttgtcgccgctttaccctcc

SEQ ID NO: 115 - DNA, 110 bp, Cronobacter sakazakii
ttacagagggtagatccgcagacggcgggcgacagcatgacccttctcaccggtgcggcgaccatcgcctcggggttcagaaccctgttcaacatgccggagaccattgc

SEQ ID NO: 116 - DNA, 132 bp, Cronobacter sakazakii
tttgaggtggactacgcttgccgtgtcggtcatatcgacgatttgcgtggtgatacgcggatgggtgtctttgtgcgttgcgtcacgcaccgtcgctatcacgtcggcgccctcctgcgcgaaagcattcgc

SEQ ID NO: 117 - DNA, 120 bp, Cronobacter sakazakii
ttttattgccgctttctgaagatgtctcgcaaaaacgcgctcgccggcagggctcaccgtagtggttattgatttccgttctttccgtgttgtgtgccttagcttttggctgataactct

SEQ ID NO: 118 - DNA, 116 bp, Cronobacter turicensis
gcgtcttgccggcccgctttctctccttaagcccccctcataaagcgttacgctttcctgttacttttacttgtaaatcaatcgcttaatatattcaaaacaaataatttcgattc

SEQ ID NO: 119 - DNA, 113 bp, Cronobacter turicensis
gttacggatgaactgaacagctccctggtatttgaggcgttgaatttccacgcttatgaccatgttttactgctgctggaaagaggcgccgacccggaaatccgggccaataa

SEQ ID NO: 120 - DNA, 184 bp, Cronobacter turicensis
aagttaaatggaaatttcaacactcatcttaaaaagtttgcactttctcctgccagcagggtttgtggcgattattattcatattattatcaaagataaaaaggcagagaaaaagaagaaagctattctgaacgaccctctgtatatcgatgccgaactcctgaacgtgataccgggcacgccc

SEQ ID NO: 121 - DNA, 159 bp, Cronobacter turicensis
gtcagcatcccgataatctgtcttaaatccgatccgcgtcagaatatgctgaagatgcgcaatgtgcttgaagtcaggctcgaaaatcacaaatggccctggcaaaagaaaaagcaataaaggcaaccttaagaaaatgaatcgataggttatcttaga

SEQ ID NO: 122 - DNA, 112 bp, Cronobacter turicensis
gcagcctgagcgatgatgccggtacgacgaggcgccctgcgctcgccagtgaactttcaaagccgcacgccgcagaggcacaaatccccagcatcatgcagagcaattccca

SEQ ID NO: 123 - DNA, 152 bp, Cronobacter turicensis
atgcgtactcaggcgggactgacaaaagacgacgttgccgaaagaatgggcaactcaccgccagaaatcacccgcctggaagatcacgcgctatgcgccagcgccgacacgcttcaacggtatgcgcaggcgtgcggcgttaaattaaagct

SEQ ID NO: 124 - DNA, 115 bp, Cronobacter turicensis
tttacccctcaatattcttcctgaacctgaatatcctctcctgtcctcaacgcaattcttcacctgcggcgaaaaccgcgtggttcatgtcttatccagagtacaaagcatataa

SEQ ID NO: 125 - DNA, 187 bp, Cronobacter turicensis
gggtgcaaatcaggatcaatgtgaaggaattatggaggataaaaattaacaacatcgcgcgccgtaatgacgtcttaataataatgtaatgctggtaagggcttgcggtgattttgatgataatcgactatggcaaatcaggaaaagaaaataaaagagggcgccgttaaggcgcccgttaattacg

SEQ ID NO: 126 - DNA, 123 bp, Cronobacter turicensis
cgcggaaatatgtcacgaatgaaatgtatttatattttgtattttaattattaattcattctttaaatctatataaaaaatcacacccttaaaaagccaggatgtgataaaaacggcaaagct

SEQ ID NO: 127 - DNA, 126 bp, Cronobacter turicensis
cagcgttctgatttcatactctgcgcatattgataaatgcagtaaataactggcgaaatataaagcgttcagaagggcgttttatggatgcttagtcagtaatcgaacataaaccgtgcgaagtaa

SEQ ID NO: 128 - DNA, 100 bp, Cronobacter turicensis
catgaatgttttccctctccttgcggctcacgcctgcctgacagcccggataacctaacgtgctatgccaggccattctggctaataaatccgctactgc

SEQ ID NO: 129 - DNA, 115 bp, Cronobacter turicensis
tggagggcaggcgaatatgaatgactgcccacaaggcgttctgtgaaaatagtgcggcttaacgtttggtatcagcagggagggtgaaaaggtaaacgtggaaagggaatatcag

SEQ ID NO: 130 - DNA, 590 bp, Cronobacter turicensis
cgctgggccattttccgtcatgaaggtgaccttcattttatacgtcacgcttccggagtccgaggagctggagtatctcatttcgagaatgcgggcatcgacccggatggcagcggccttaaactttgcctctcttgccatttgaaatgagatgatccaataaataacgataatcaccagcacagcgccggcaagagtaagaaaaaactcagccattattgcttattctccctgtcgctaaaattgtcacccgctctctgcttacggcatcctggagagctaagaatatggcgatttagcggtgtcatggtacctacccttaaaaatgccatgcttttatgtcagccaatactcaagcgggcatcatactgataaaaaactgttttatgcagaataagttattcgttaaaatgaatagttcactcgtgttattattttaatagcttcagtttcactatttatgtctggcttattcttaatcagtcatcagtctgtgaacccgatccgttgccaggtaaatttccacttttcactttcgagcaaatggctaacactttgcgcttaggcgcgatttcgtcatacttaaatcc

SEQ ID NO: 131 - DNA, 105 bp, Cronobacter turicensis
gttagtctgaatttcgcggcgcgcaaagagtggcgcaggcgtgtggacgttgaaaagtgttacgcgaattatccggcgcacgggctgctgtttcgcaaacacctc

SEQ ID NO: 132 - DNA, 133 bp, Cronobacter turicensis
agcacggtttatgggcgcgtgcgacgcggatgggcagacactggcgccagtttaagcggggatggcagtccgcatccttatttacgcaattaattaaatgtacgctggcgacacggtgaaattaatttaatcg

SEQ ID NO: 133 - DNA, 163 bp, Cronobacter turicensis
gagccgaaatccgtataaaacatcagtgggcaaatagggttcattaattaacataataaaaatgaaggaacaatgagcaggtaataaatcagagtagggggtgggtattaatctgaatgatgtaacagataaaaaaacggccctcttgcgaaggccgttagcg

SEQ ID NO: 134 - DNA, 414 bp, Cronobacter turicensis
caccgtaaactcatgagtgacgtagtgatgcgatgacgtatcaaccgatacgctgtacgttttgccatcgacaaagtgaaacccctccagcgcctgcgcgcagcgatgcgcgtccagcattaacgtgctgtatgccaggtttttgttataaacatctttttgcgcctcgtagctccataccctgacacgcaggatcttttccggcgcaggcacgatctcttcatccactgcaacgcagagctgttcatcgacgaggttaacctgcgcaagcaaaaaacgaacgcgatctcccaaggggcagcctgagagcagaaatacaaaaaggggaataacggtttttttcatagaggcagtcctgtgccggcgtcaattaagacacattatgcctgccggtaagccgtagcaaacctgtta

SEQ ID NO: 135 - DNA, 129 bp, Cronobacter turicensis
gatatcgtaaaggggcgcatttttggtgcctttttagcaattttattgcgttaaattattcgtcatatcaattaattgagatcccgttgggttccgtgagcgtttttgagacgtcatatttcaaaatat

SEQ ID NO: 136 - DNA, 177 bp, Cronobacter turicensis
gtgaggcggggctcacgcgccgtctcgctatagcgggcagattgattcgttgttcgacattatgaaaacaatgtttcattatagtcggcgctgtctgcatgacggcgccgacacgcctcgcggtatccttgtgccgatctctgccgtttttctttatttattccctttaaatatcaa

SEQ ID NO: 137 - DNA, 224 bp, Cronobacter turicensis
gataaaggcataacctccctggaaattgcaggtataaaaaccaggcgatgcctgctagcgtaaagggatgaacctattttctgctgtaaacgccgcgattattcgcactgccttcaggccggtgggataacgcgtatcgctgacccgcctgcacggcgggcgccttgcaggctcaacactgtgaggttcgctatgtctcgatccctttcatcgccccatacgcc

SEQ ID NO: 138 - DNA, 137 bp, Cronobacter turicensis
gcgctctttttataagtggtggctattttattttttaagccaataattccatggcgggatatttaaatagataatcattttctggcgcttaaaaaggccttcggaagaccatgcgagagcgcaaagggcgatgagga

SEQ ID NO: 139 - DNA, 181 bp, Cronobacter turicensis
tgatttattgatggatgagaaggcagagcggcagcttagtggttaatttttatgatggcttttttttacatttgggaaactaatataaacgagcgggttttccagaaacagattatctaaaaaaagcggcgcatcagcgccgctcgtgtcccgccagtccttcgcttaacgcaaaagttca

SEQ ID NO: 140 - DNA, 128 bp, Cronobacter turicensis
aaaaagtaaatggaagctcaacagcgttgatgagttcaaaaatgccgcttttttgacgaggagatgaccgtaaggtgatagcaatattgtgaatttaccgcgtggccgccttttttcgcttatgagcg

SEQ ID NO: 141 - DNA, 229 bp, Cronobacter turicensis
agcatagaaataaactaccaataaattaatgggttgcatagaactgtggttatgccggggcacagataatgacgcagaggcgcaggcagaccgaaatttacgttagggaaagtcgctcggggccgttattgacgggcattattccggcaggggcgtgaataagaaaaataacgattttttgggcacggacagcgggggagaagcgtctgaaaaaagggcttgctacgcg

SEQ ID NO: 142 - DNA, 239 bp, Cronobacter turicensis
gcatatcaataaaaatggcctgaagcagaaataattagtcgttatttatgcataatgcagagcagatcgctgtgcgttgtgtgaatgtagattagtggttaatgaaaagtgtcttctttattttgcagtaaagtagagaacgtcccgcttatatttttcagtaaacggagagcgagaattgaataaatagtgaaggcaggtgaaaggctattcagaataaaaagagggggaatacaggt

SEQ ID NO: 143 - DNA, 153 bp, Cronobacter turicensis
tcagatacacctgaccgtcttcgccgacgataaaagcgtcggtggcgtcggcatccgtggcggtcgcgccaaacggcaccgggtggccgtctgcacgtaataaggtcatcaatgcgcgagcgcctgttcgggtatcgaagcgggcgcgcacta

SEQ ID NO: 144 - DNA, 126 bp, Cronobacter turicensis
ccagatttaccgacaggcagggggggccgttgcgtttatcagcaggatgcagtgaaagagggggaggccgaagaggggggttgatagtggtctgagaagggtgggggcgctcacgcttacccaccc

SEQ ID NO: 145 - DNA, 134 bp, Cronobacter turicensis
gcgccgcagggttacgcacagccaacggccgcgcatcagccgcagcctgccgcaccgacccagggctaccagccgccttcagcgcctgctcagtatcaggctccgtctccggccgcgcctgtacaggctcaaca

SEQ ID NO: 146 - DNA, 137 bp, Cronobacter turicensis
ggaaggtttgaaaggtgtaatgcagttattcgttttgctgctcgttgtgaatgctctgctggctgaaccgcacggtcaggccaaaggtaacaaagattgcacgcgcttcttattaaacccatcgctgccataacgct

SEQ ID NO: 147 - DNA, 339 bp, Cronobacter turicensis
gctttcgggcgtactggatggcctggccggaaacattgataccgttgcaaacgttgcaggcgcgctggttgggctgggggtggcacgatacttcggcaatatgaccgccagcgtcacaacagccaccgcctctgtcgtggcgaacacgacggcagaggtggggcttgctgaagcgcagctgcgaggtgcccaaatcagtgtggcaacggcaaggcaggctttttaccgcgcgcaacaggctcgtgccgccgcggcaggtatcgaggcgcaaatcacagcggagcgtcagttaaccgtggcacaggcacaactgaatacagctatcaacgctcgcgctgc

SEQ ID NO: 148 - DNA, 985 bp, Cronobacter turicensis
tgagcgaaaagcggtcctttaatccattgtgtatcagatgcaggactaacactggcatgtgataatcaaccggggataggtgataggtcatcgcatccgctcaggtaatggcgatgtgattctacgttgtgagaaatgtacaaagatatttggtgttaaaaaatgacggaaatggacgatgactttttagaatatgatctggactggtttttatccagccaggaagggtacttggcgcattttgcaacagcaggcctggggccggttcctgaaaggatcaaagcatctgtcgaggactataattttattcttgattatatttactcactggaacctttgtcagaggtctatgtgatagaaggcaatctgcctgcattttcagatgagaatcaacgatcttgctatctgcgctcatttgttgagatgtcaagtaaagggttgttcagctacgactatgaacaaggtggatataaattaatttcgaaacccaaaacgccattgaaatatgaaacattgccaaatgaagtgaaaggcgtgatttatattgcagatggagaaatagacttatagatatgatgtgctgatgcgacctgtgctcaattttttgacacacaatagccctagaaagatccgcttctggcacgtagcggaaggtatcgacattctacagatctctcggcaccccgcgctgtctggaaagagggctaccatcaaggttaacgtattttgttatccagctcgtttgactgacgcactgagcacaggggcgaagccgcgggaagcttctgtcactccccccatggttcgcaaaacaagcttaacaagatttttcagacacagtagtagccgaaatatctatgtattttttgaatgcagcgtcacgttttacccctctcggatctgataagaaagggagccttaaccgtggtgtatcggatactgtgacagtccagagataatcacccataaatctgaagttgatccg

SEQ ID NO: 149 - DNA, 428 bp, Cronobacter turicensis
ttagcgatattgaattaacctgttgcataatcaattccataaacgatccctttcccaggcagcaagtgcaccaccaacggaggcgcctgtaagtacacatgcaggagcgccaggcccacacatcattcccgccatcactccacccgcggctgcgccagcaatacccgcgctgtttatagccagttaccttcctgactccgagattttatcgtctgcgttatagatctcgtaaacagaaatagcaattgaaagcacgatgaggccttttcctaaacgcgaaagttgcatcggttcaagcagcattacgtttatgcaaaatttcctttcaagcacgtaggacgctttacttagcgtagtcacatattcagcactttatatcgttgcttttatgatggaacacaacttaatccctgcgccgacttgcctgg

SEQ ID NO: 150 - DNA, 172 bp, Cronobacter turicensis
attgcgcgggcgtccgttacgaaagcgccagcggtggccgggagtaatgaaattacgcagcgtaaaaaatagcgtcgcgctttaaagggcaatggaaaatatattttgttaaaacgaataaacgacacgactatctttgtttaacgcgcccgggaatttattttgaggtgat

SEQ ID NO: 151 - DNA, 173 bp, Cronobacter turicensis
ccgtgcttctggcgttaaatgacgaacaggtacaaccgcaaggccaaagatgttaaagtactcatatacaaacgtgaaaacgcagagcgattttcagttgtatgccaaagcgcgtaccaatttggcaatagttggtcagatggtgtggcgcttactaaaacccgtcaaactta

SEQ ID NO: 152 - DNA, 138 bp, Cronobacter turicensis
ctataacataaataggtataaacgatacatcttttgttcaggtgggggggtaacgtgataatctcttcgtttcgcttgttaatgtattgataaatcatcgctttcgaccgctatttttgcccgctgcaggctctccgg

SEQ ID NO: 153 - DNA, 103 bp, Cronobacter turicensis
tatataaaattgcccgaaatatattcagtaagccaaaacgtttcgggatatctattatggtttattagcgaacccaaagaataattattttcatttaaatcgg

SEQ ID NO: 154 - DNA, 301 bp, Cronobacter turicensis
tattaaaaaggccgcgcgagtggccttttttaattccggctctgggaggagaagccgcaatgaaacactggacgctgcactggctggaggcgcagggcgatttacgcgatgtttgcgaccggatcgcacaagaaacggacgcggcgtgtcagacgctggcaaacgccgtaaccccgccgcgactcgatatgcttgtgtaccgcgcgccgggtcaggttatcccggaaatcggtatcgcgggccgcgcgtaccacggcgcgttattcagcatgggcgttgacccggataacccgcagctctg

SEQ ID NO: 155 - DNA, 271 bp, Cronobacter turicensis
cgccgggcatttcgtcacctggctgatgcacagcgcgccggagccctgggaatgcgcggttgaacgtgccgcgttaaccgccgcgggcgtcagcagcgccgcgctcaatgacacgcattatgaccatgcggcctggttttttggcagcggcgcgctgccgcgctggtacggctatacgctcggctttgaaatggcggcggcgtggctgagcgaggcgggcgccccggatgctgaaaagcggattagcgtgcccgcagaagaggtgattgcc

SEQ ID NO: 156 - DNA, 124 bp, Cronobacter turicensis
tttttaaatgtagtattgggtgatacatgtaatttttatttgtctttgaaatgcggtgtaacatatatagatagtgagccccttgttaacgtcagcgccgggcgtaacatattcaagtaattgt

SEQ ID NO: 157 - DNA, 246 bp, Cronobacter turicensis
ctctctctgacgctggggtggagtgaggaagagggtgtggtgatggagtttgatgtggcgataaaggagcgcggaaatgagtgatgttacgctggatacaaccgtcgctcaggcggcgcagcttctgggccagtcccgatatcgggtcgatattcatggctgcagtgactttctggacgtgctgagtttcagcgcggaagaagcgcttagcgcaccctggtattacgacatcgcgctcacctgtgc

SEQ ID NO: 158 - DNA, 147 bp, Cronobacter turicensis
agttggcattataaaaactccattaatgatgcaggcagtctacggcgcaaagattagtgaaaccttaacctgcctttaacagcacgccaggcagattcaacgaaagctcaacggcaacacaattgttgcaattacgtggcgctctgg

SEQ ID NO: 159 - DNA, 113 bp, Cronobacter turicensis
acagctggaaaccgtgcacgccgcacgcgcctggcctattgatagcagacctgctatttccaggggttttcagccgagcggattgcgcgttcatattttattcactcctgtta

SEQ ID NO: 160 - DNA, 248 bp, Cronobacter turicensis
cgcgtttttaagtaattatttctggtggtgattataatttttggaaatagtcgcggttatgtttgcagctattattttgccgctgcgtttataggcataataatattgtgcctatatgtgatggcggcctgacaatatatttttagtgcttaggattatccttaggttcggaaatcaataagcccaggcctggccgtgagagaacaataagaaaaagcgatagccgggcgcgagtcccggcaggagat

SEQ ID NO: 161 - DNA, 129 bp, Cronobacter turicensis
gcgctttcaaacttatcctgtggtacaaagccacgttttatttatcgccaggcgataagctcactcttaatggcgaggcgatcgtggtgaatgatcaccctgttcagataaccctgtaccggaccacgt

SEQ ID NO: 162 - DNA, 144 bp, Cronobacter turicensis
ttccagaaattaagtcacaacagccaggcgcgtcataagaaataacttgcaatttatcgctgagattaaataatgcggcgaccgacacgccattttccgcggtgcggataatctccagcacttcatcattgatacagcgggcgg

SEQ ID NO: 163 - DNA, 103 bp, Cronobacter turicensis
tacgggcgcggcgaaagcatcatcggcgatttcgcgataagccatcgcttacgggacggataagcctgataaaaaagtaatggaacggtttgtctattattta

SEQ ID NO: 164 - DNA, 144 bp, Cronobacter turicensis
aagaacatactacgttaacgcctcggataaaaaagccgctaattaagagcggcttttttatgcatattatttagtgcggggatattcgctgcggtaagaaaatatcagctgagattattctgtccaatacagcttatttaaaat

SEQ ID NO: 165 - DNA, 133 bp, Cronobacter turicensis
cccggcgatgccgggctgataagcgctagttgtcgcagcgcgcgtgccattcatgattaacccgctcgctgcatgcctgcggatcgttgaggttacggcacagcggcggcatgggcggcggcgtgccgcaatc

SEQ ID NO: 166 - DNA, 187 bp, Cronobacter turicensis
tgagtgagaggagataaacaacaatgataacaaccagttaaacagtttttgagatttcagaatgtaaatggcaaatgatatattgatttatatgtgacattcatcacgttttaaacggcaattccttccagagcgcctgctccttgttcgcgacgcagggcgcggcccgacgcgatgttcccggata

SEQ ID NO: 167 - DNA, 101 bp, Cronobacter turicensis
gaataaaaacagtgagttgcttcaaagaaatgcaagcatgctaatgatgttattttgaacggaatgccaggaaatttgtgtcagggcgcgcctcacggcga

SEQ ID NO: 168 - DNA, 230 bp, Cronobacter turicensis
cagcgtaatgtcgttccacctcttcctgctgtattttctggcttctctgcttcataaattccgcgcctgatgcatttcttatgatgtaaaacccacatgccataaaaaacctttaaaaataaatttctgcgtcgtcagtaactatcagcgtgcatcgggtacaactcgctgtttgataatgccagcatcaccccggcacagtagcgctgttgcagaccagtgagcttatt

SEQ ID NO: 169 - DNA, 141 bp, Cronobacter turicensis
ggacccgtttaagttggggcaaggctataaatttattcaaacaaaaaaattaagaatattcccaatagaaagctgtaccccaaaattttgtgagctacgtcatagctcaaccaagcgccagctatcaggaatttgtgccaa

SEQ ID NO: 170 - DNA, 128 bp, Cronobacter turicensis
ttatccgattgcgatacgctttaaaaacgcagcccacctttaaagcattagcgccagcctcactgatatccatcccacggacgcccgccattcagaatccctcgcgcgtgttattcctggcggctcat

SEQ ID NO: 171 - DNA, 111 bp, Cronobacter turicensis
cagaggcagagaaatgtggaggacaggtgcgggtgagctgaaaagaacatagggcgaactgcggtcagcgccgccagcagcgtggcgggcctgacatcaaacactcaggaa

SEQ ID NO: 172 - DNA, 126 bp, Cronobacter turicensis
tgacgacgccgcggcgggatttcgaaacggaaaaggtgttgaaatggtgttatgatttatgttaattacaaccacttagctaagtaaaatgtataaaaaaagcctctgataatcgctggattacca

SEQ ID NO: 173 - DNA, 344 bp, Cronobacter turicensis
agaattcaacgaccgcttatctatacatagatatatcgtcaaaaaatgccgtaactttatggaaggagccaataaagtgactcttgttgaaataaatattatttatcagctagttatttttaagttaaattaatttttaatgacttaagtgaaattaaataaatcaccagttatttaagctcaggtaaaataacgcaatttttgaatagccgtgacgtgccagggtttgaaggtaacatctattaaaacaagaggttattcttaagataaattttatgtatgacgccgcggcgacaaggagattatccggaatatttcagataaggaaatgcgggaaagtaaaa

SEQ ID NO: 174 - DNA, 130 bp, Cronobacter turicensis
caaaacgccacaatcccgataaacgaggctgctgacaagctccagaaatttggaattacgcaccgtgattaatttattttttattgttttttaaggaaaaatggtgagtgaaaaaatttccggcccctgt

SEQ ID NO: 175 - DNA, 102 bp, Cronobacter turicensis
tcaggccagtcaggaagaggcgtaaccccgcgccgcgccgggccatcgcaaagcgccagcgcggacctttcagggcgcggcacaagccgcacgccagcgtaa

SEQ ID NO: 176 - DNA, 479 bp, Cronobacter turicensis
acagcgccgctttacgcgggctcgcccggcccttatgtgctggcctttatcgatatctccgccccgccgctgaacgacggccaggcgctcaccgcagcgcttcgtaaagcgccgaccgtgcccggtcgagcgtcctgctttttatgcgaagagagcgatcaggttgaaatgctctatctgtatcgcctgccgcctggcctgtcggtcgacacgctgcgccttgccgtaaacggcgatcgcgccgcacgtcatcaaatgcagcaaaagctcgcggcgtttgaagataaagacggttataaggtggacgggctgctcatttacgagcacaaacctgacgaggtgcgcctgtacgcgatgcccgccacgcccggtaaggcgttgcataaagtgagtaaaccggtgaaacgctacctgtcgctatcgagtctggacaagctatttgaagacgcggcggctgaaattccgcgtgaaatctgaac

SEQ ID NO: 177 - DNA, 101 bp, Cronobacter turicensis
gcttcaggtgttaatagtttaaaaccgatattttatttcgcggctatatttcacaggcaacaaaaatttgttttaagtcacccggcgcaggccagagaagg

SEQ ID NO: 178 - DNA, 128 bp, Cronobacter turicensis
atacaggaggtacagatggcgtaatgaatgaggcgtataaaagggattcagggggatgtgtaaaggagcggctttgcgaaatagctttgatcagagaaaaggaagattcaggagagaagctgggtgca

SEQ ID NO: 179 - DNA, 189 bp, Cronobacter turicensis
tatggcttatctgattctttttacgcgctgttaattgactgcaattaacaattaaaaacaataaatttcagtaacataaccattttgtttaatacgcatggactttttttctggtttcgctgtcccatattaatcccatttgcgactttccttaaaataaccttaatttccgcttttttaccccgcacc

SEQ ID NO: 180 - DNA, 136 bp, Cronobacter turicensis
aggcatgtggagacgcttgttcacacctctctaaattagtatttcaaaatcaaaaagataaaaaccaacaacagcgatcaaataaatcctgtacgacattttttagatgccgggaaaccgtggcatcagggctcaa

SEQ ID NO: 181 - DNA, 1051 bp, Cronobacter turicensis
cacaatttccgaccagcaatctgatgttcagctctccgcctcctacgaccgggttcaggtaacgaataccgggtcggcgttcagtaattcaggcgcggcgctcagcatcggtcagggcgtcgcggtcggtttactcgataacgacggcacaatatctgctgaaggcaacagcctgaataccaacacctattcttacggcctgaaaaacgagggcacgatcgatactatcgataactcgggtagcattaaaatgaccgccgccagcaataattattactccggcagcgccattaacctgactgaaacaagccaggtcggcacactgattaacagcggtacgattgaaggccctgactcctactataattatggcggcaactatagtcagggcggcataactaacagcggtacgctcggcaccctgaaaaatgtcacatcaggcgtcattacgggcagaaccggcgtgaataacagtggcaaaatcgatctgctggaaaacgcaggcattattaactccactaccaccaccaataccagcgggtacaattatagcagcggcgcagtttctaacgcgggcactattaatacgctgcataacaccggcactatcggtaacgttaatactaacaacagttattataattcaggtattttcaataccaacacaggtgttattaaatcgttaatcaacgacgggcatatcaccagtagctatattggcgtgtataacatgggccatattgatacgctgactaataacgccgatatcactggcaacctggtaggtctttatagcgtaaacaataccaataacgagacgtccgccagcaccattattaataatggcactatcagcggcagttatggcttttataccacgaattataatactcaaacttcagcgattacgctgatcaacaacggcacgattaacggcagcagccagggtatttatatcgcaggcaataacggcgccagcacggtcattaccaataacgggacgattaccggcaaaggcaatgctatttatagccagggcaataccacctcc

SEQ ID NO: 182 - DNA, 195 bp, Cronobacter turicensis
ttttatttcaggcttcccccgcgcgtttctgtcgcctttgccctgctctcccctttcttgccgaacgcgacgggtcggtttaatcatgaacctgcgcgggagtgcgtctacccttaataaaaacgttcaccgttgcacggggccagcgccgcgcttccggcgttgtttttacgccgttcaacgaaaccgtatatt

SEQ ID NO: 183 - DNA, 100 bp, Cronobacter turicensis
cgcccctttttcattgggttataacggtactccccataaaaaagccccttcatcagaaggggcttaatcgcgcaattaaagcgtaaggttcacgggccgg

SEQ ID NO: 184 - DNA, 119 bp, Cronobacter turicensis
acggctccctcccactgacgcgccgttaacgtgattccccgcttattttcacgtactctttaaaaaaagaattaaagaaatcagaaaagaagcgtaaaatacaaaccagataaccccct

SEQ ID NO: 185 - DNA, 106 bp, Cronobacter turicensis
gcataaaaaagacacgctcaataaaagattaacggaaaccgttatattctcccgttacgtcttgcggtatttagcggcaaagatttgcgaggctgattccatttaa

SEQ ID NO: 186 - DNA, 113 bp, Cronobacter turicensis
cggggaggctatgaggcgtggtttgccattatgaagtgcgccatggcggcaagcgcttgcaggcagacgagcctttctcgtgcattcaggcagaaagcgccgcacaaccaggc

SEQ ID NO: 187 - DNA, 117 bp, Cronobacter turicensis
aagcgtaatcggtgacagtgaaaaggcggggaaacctgccttttttattggtgtacagcgtggcgacaggaatggatggtagtcgttgatgctggcgggtgcgctttgcttacccgc

SEQ ID NO: 188 - DNA, 150 bp, Cronobacter turicensis
aaacgttcacgcaacctgaagccgccggtaacgcccgctttttgttttgcgcgttgcggcgataaggcaatagcacggcgtcagcgtttttcagaggagttcggggtgtggcgagcgcaaccaacgccgtcacagcctgaaacaggaaag

SEQ ID NO: 189 - DNA, 176 bp, Cronobacter turicensis
aggctttgtacacatggctgctttactggaatgaagttcgcattggtgaaagaaggctgtttttgatgtttctgtaaaagcgtattttgccagtccgtcaggagcgcttcaggaatgaaaaatgatagtgatatggatatctggttatatattgctcaatgccatgcttatagcaa

SEQ ID NO: 190 - DNA, 104 bp, Cronobacter turicensis
ggcgtccgccgccgcaggcgctaccgccgcctcttcaacaacgggcgcttcaataacagccgcgtcttcgatgacgtcttcttcgacgatcgtttccgcgaccg

SEQ ID NO: 191 - DNA, 310 bp, Cronobacter turicensis
acggctgacttatcagagaaggtatgactggattgcgagcgggcaaaatagcgcccgctttttcatgtgctaattttgtgtagcgtctgtaaattatttcggtgaattacatttcatattcaaatacattcagatgcattagtttcaattgtttcacaaatgttttttatagttattattttcttgaacaatcaatgagtttttaaatgccgtccccgtcagcatttcccttccgcagtacaaacacctcatctaccttataaaaaacagcgacttaaaaaacttacggtaaaaagcgttattaacgact

SEQ ID NO: 192 - DNA, 154 bp, Cronobacter turicensis
cggtgctgtgcagcggcatctttgtcgcctttttattatctcctctggccatgccggaacgtcgcaaagcgagaaaatcacgatgaaaaatagcctctggcaggcgggcatgctgctcgcgttatcactgcttggcggatgcgcgccccattca

SEQ ID NO: 193 - DNA, 121 bp, Cronobacter turicensis
gtctacctcgccccgatcctttccttaaggaaaaggcctgtggattcgggagatttataacaagacaagttttttacgcctttccccgccgggaaaagcacagggtgaagggtaaaacctg

SEQ ID NO: 194 - DNA, 154 bp, Cronobacter turicensis
cctgcgagtttgtccgctgttttttatccagacgggcaggtgaatctgttacgaaggcataacgttcttcataacgtgcggccagctttgacaggcgttcaggcaaaaaataatcgtcgtcatccagccctgtcacgaagacaccatgcgaaag

SEQ ID NO: 195 - DNA, 1036 bp, Cronobacter turicensis
ggataatactatttagcttcctgaaggcgtaacagaacaacgcaacaataaaggcaaaatagagcaacaaacctgatgggcctttcagcgataaagtttctaccacttcattatgcaagtggcctttcataaaaagtaaggctccacgcaaccctggctctttctttacggttgcagcaataatttcattacgctgatcggttgattgccacaaaaagttattcttcgcagcctccagccctgtttgccacatagccaaacgcgctccgactgaggttagtgtaatatttctgtcgtaggcggcaatatcgctattaaaatcattataacgtttagcaatgtcttccttcatcatgaaaatacccacgattaaggcaagaacaaatgcgatgatacccttccagggaatatgtttttctttataaagtttgatagctaacagcacaaggaaaataagaggataagctataattgccgcacgagtaccggtcgccaccagcatcaaaaaggtcacgaaaaaatgccctaaaatgagtgattctttccacttatgctgactgtgctggagaacattaataatataaaaggagaggaatgctattgtataagccgcacccgtggcatcggcgccacccgcgagagaaagcgttacgcgtccggtaccaaggaatatggcctgataaccaacatatacgcccatcatcagttgcagaaggatagccagcagagcatgaattttgttattgccgatacgcaaatttcgatgattaacaaaagcatagatgcagaatgcacccgccacacatattttcccaacctcaagataagcgcggtaggagttaatcgccggactggtatctactttaaacagacggtaccataccagatcgcaaataccgataattaacaaaacagcacagagccaaaaggcgtcattttttttgaaatttttgatatcgataataaatgcgatcagtgctattccgcctgccaggctgaaaatttttgcagaaaaatttggcgatataacgacgca

SEQ ID NO: 196 - DNA, 140 bp, Cronobacter turicensis
acaattatacctttggctttattaatggttcgcactttttattccgccactgaagtcgtttgcgcctcgcaatggcagcctgactggctcgcaccttacacaacccggcgcagcaatgcatccgcaattagggggaacgg

SEQ ID NO: 197 - DNA, 208 bp, Cronobacter turicensis
tgtgcggcatgcgacgggcaaccgtcgctgttgctctttttttggcggtcccggccaggcccgcatgcttccgttattctcctcaggctcatcatgatgaatcataaccggcgcaacatatggcgctgtcccactgcgctgaacgctacccgccgtacttaaaggtttctttgcgcgtatcctggcgatacccgtcacagcggcggtg

SEQ ID NO: 198 - DNA, 230 bp, Cronobacter turicensis
ctgactgaagcgacaaatttagcattatcgcgcctttaacactctctacctgtattagggagagacggtgacatcagcagcacgccattttcatttgtatcttttttctcatttcactgcgccgcggttcgtataaatttttagcgtggcgaaacttgctgccaggagttatgtcaaattagtaacaagatgttcacgctttatcattactttacagattgcgtcagaac

SEQ ID NO: 199 - DNA, 1375 bp, Cronobacter turicensis
acgcaatcttaacccggattatgagtatcgcttttatgatgagccggcgattcttgcctggatcgaaacgcattttggccaggatatgctggcgctgtatcagcgaattaaccctgaatatggcgcggcgcgggccgatctgttccgttatctggtgatttaccaggaaggcggagtctatcttgatgtaaaaagcttttgttcacgtccgcttgatgaggtcatcccagccgattgcgaactgatgcttttccactgggataaccagcctggcggacaggatcataaaaaaggtctgcacaaagaactcgcagaactgccgcatggagaataccagcagtggaatgtcattgcggcgcctcgttcgccgtggctgcgtgaagtcattgatgaagtgacgagccggataaaaaattatcaacccgcaaaatatgggattggtatgaaaggcgtgctgagcacgaccggacctatcgcttttacccttgctattcgccgtatcccgttcagcaaacatgttcatgtagtccgcgatcaccgcaccgctggtctgaaatattgcggcgtggacagctctgtccttaagcgttttaaaaaaagtgcttatgcccgtcttaagacccctgtcgtcacgctgagcgaacgcgatcacgcgcgttatcaactatggctgttctttgtattcccctttaagcggcttcataaaaatatcgttaatgaaaccgacattgcgctaaaaaaaaccagcagactcctggctgacagacgtgtagatcgcacgccaaaacgcaggaagggctgggtcggcgcgtttcgccgcaccggtaagcggcttggtttactggtcgcagcggtgctggcgctgactggcctgcatgccggatacgaacagctcaccggtaattttcatgaagtcattgaaggtgagctgtaccgttctgcgcaaccagacgcaacggatatcgccgaatacagcgagcggtatcatatccgcactatccttaatcttcgtgatgagccacgcggcgactggtatgagcaggaaaaggcctcagctgacgttcacggtattcaactggtggattacccgctgagttccagcaaagaaatcagcgtcagggaggcggaaaaactggcggagctgatgaaaacgctgccgcggcctctcctgattcactgcgatcatggcgctaaccgcaccgggttggtttctgctatctatctggatgctgtcgcccagaccagcgatctcatcgcgcaattgcagctaagcccctggtatggccatttcccgattcctgttatgggccgttacgccatgtacagttcctacaagcgattccagataatgagcccatactgatgggctccgtta

SEQ ID NO: 200 - DNA, 191 bp, Cronobacter turicensis
taacaaaataataatggcgccggttaacgggcacgacttatccccacgccggagaccattccaccagcgtttgcgtaccttttgcgcattacaattttacgagcgtctcgttgaataccccgttgtgtgtctgactctcccgccagcatttcaaaggtcagaaaggccagctcatatcatcaggagaattg

SEQ ID NO: 201 - DNA, 106 bp, Cronobacter turicensis
atgggggcaggtaaaattttatgtcgcaaacgggtggcgatacggatggaaatcattaaaaaaccccgccgatgcggggtttgtgagagaaaagaagacgagcggt

SEQ ID NO: 202 - DNA, 223 bp, Cronobacter turicensis
tcttcacgcgttcagtttacagagcgtttagctttggtttctgccgcgtcgtttactgacaaagaaaagaatctggcaggttattttattatcggcggtgcggataatgtattgtcggcataaatcgaagctctggtcttttattaacgaacgccaggctattcgtcacagacaatcttaaaaagaaaacggccttcactggaaatgaaagtcgtcaggaacg

SEQ ID NO: 203 - DNA, 114 bp, Cronobacter turicensis
cgccaccagcacgtacaatgccagcgctttcagcgcggatgaaagcgtcacggtctcatttactgacaatggtggaggcgccggcggctcccagatgagtgcagatgcggttct

SEQ ID NO: 204 - DNA, 106 bp, Cronobacter turicensis
cgcgtcgggcgccgcttcgaccgcttttaaccttagcgtgggcataaatactttcgggatcgtcgtcaccgccgaagatggctccacgaaaaattacagcgtcaca

SEQ ID NO: 205 - DNA, 150 bp, Cronobacter malonaticus
tggcgcgatacaaccgcggaggcagatcaagcttgccgcatttttcggcgtagtttcaggtgacatgtgatgcggcgagccgacaagggcaacaccataaacgggagcgcggcctgtgattttatttattttaataatgagtagtgcgac

SEQ ID NO: 206 - DNA, 161 bp, Cronobacter malonaticus
tgcaataataattgcggtaaataaatcacaaggtttaattaattctgctgatattcacgcacgatgatgggcgtggtggtgctatttatttctggtggcgggagtgcattttataaaatgccatgggtaaatcccatcgcggtagcctgttcgcaaccctg

SEQ ID NO: 207 - DNA, 110 bp, Cronobacter malonaticus
gtaatcaaacagacgggcggtattaaccgcccgttttttctgtgtatagccctttttctgctattttattctgtcagcaacatccgtcttccggcacaccgcgttctctc

SEQ ID NO: 208 - DNA, 145 bp, Cronobacter malonaticus
aggcagcgcgcgataaggcgcgctttgtgtcgcgtgatggaaagggagttccggcgcgttttgcacacgtttcgccagccgttgcacgtcgggcttactgacatcgtaaccgcggtagctgctacatcgtgcgcacgcctgtaac

SEQ ID NO: 209 - DNA, 129 bp, Cronobacter malonaticus
atcaatattactgacgtttgatggctttaccttgttgcttgcaagctacgcgttgttcctgatttttaccagttattataagtttgtaaatgttgtctggtaattttagtgatatggcttttagcggcc

SEQ ID NO: 210 - DNA, 108 bp, Cronobacter malonaticus
aagcgttacgaacgcttcccccgcgctgtctcgctttaattctgcccacacaaatcgctggtgcagtgcagtctggaaggggcttgcgggcttcgcttatgtcatccg

SEQ ID NO: 211 - DNA, 220 bp, Cronobacter malonaticus
cagggtcctctgccggaataaacgtattacctgcggatattcccattttattctttgtggttgtgcgagccgtcgataatacgcggctctctgcgcgctggcaggataatacttttttcttatttctgcacagggttattcccgacgtgttttaacgcggcaagaaatatattctctcctgagacaaattccattattgataagcgttacgcgagtccgc

SEQ ID NO: 212 - DNA, 121 bp, Cronobacter malonaticus
tccccgcgagagcggggataaaccgaacacgtcgtcgtaggcttttcctggccaccactgttccccgggcgagcggggataagccgcggcagcgtcaatacagacttcttttgagagcctg

SEQ ID NO: 213 - DNA, 224 bp, Cronobacter malonaticus
atatcaataacgtggtttattgaatatgtgcaggagcattattttatatggcaatatataaaaaacaattctgagttggggtataaagataacggcaatgcttaaagaattaaagattattacatcgcttctatttttgctgattatatttatatgatttttattgctggtttttatgtgggttaacttaatttcaaagttgaatacagtatttattaatttgt

SEQ ID NO: 214 - DNA, 543 bp, Cronobacter malonaticus
tgtcgatcaaaacggcgaggacaatacgaagacaaacgatcggctttttgcgttcaccgtaaatgtgccgttcagcgccttcaaccacaagggcgagtttgcgtcagcttcaatgaactactcgctaaacagcagccagcacggcgccacgatgcacagtcttggcatgagcggctcggcactggcagacaacagtctcaactggcaggtccaggaagggtataacgccgctaaccgtaagacgaacggtaatgccagtctcaactatcaaagctcgtggggggatgtgtcgggcggttacggctatgacaattacacctcacgctacaactacgcgctacgcggcgggatggtggcgcacgctgacggccttactttctcgcgcacccttaatgagagcgtagcgctggtcacggcgccgggcgctaaagatatccctgtgaacgggcaaaacaatgtgcatacggatagtcagggcaacgccgtcgtgccgtatgtccggccttaccatgaaaatgctatctcgctggatgacagtgaact

SEQ ID NO: 215 - DNA, 258 bp, Cronobacter malonaticus
acttccacagcaaggccaactacaggtgatgtggggtgccggaagcgatcgccagtgcaccgtcaactattcgctaaaaccgacggcgtccaccggcgcgattatttttcagcaggcggcgtgtgagtaaacactgctacctccagaggagttaatgcaattatgtctggtttagtttttcgcgctgcggcgtctggttatcgacgtgcttttctggcagcactcgttttctgtgaggcgctattttcctttcagagc

SEQ ID NO: 216 - DNA, 136 bp, Cronobacter malonaticus
tctggcagccgtgaaattgccaatgaaaaggcctgcgcgtgcgggcttttttattaagcgatgcagacagacagcggcaggtttggcgaagcgcgctgaagacagcgccatacagttgaggcgcagaaaagaaaaa

SEQ ID NO: 217 - DNA, 242 bp, Cronobacter malonaticus
tcgtctctgcgtggtgttgccaagcggggaggcgcaggaggtgtttttagcgcaggaatcgccagagagctatcttttcaccagccgggcataaaccacaggcctgctaaccggccgggagaacacgaaaaaaacgtaaaaaggagagcattacgctctcctttatatttcatgatgctaaaagcgtacccgttcaatgatgaccctgcggtgtcatgcaggaaagttacgctttagtgctg

SEQ ID NO: 218 - DNA, 137 bp, Cronobacter malonaticus
agccagtaataaaatgaatattatgaaaaatatcgtcatattttgacgtatttattttggacacgactgacgtcacattcaggcccgacgtgcaacgactcgcaagcggtggaggcaaaggccgggagaccacgggg

SEQ ID NO: 219 - DNA, 204 bp, Cronobacter malonaticus
gcgacacataattattttttattttaagtgttttctggtgcagtttagcggaaaaccatcaattaaaatgtattaataatacacacttgaataagttaaatgtgttgtaatgataaaccacagatataaggtggttatcaggaaaggcgttgttcttgtgaaagataaacggtttccggtgtttttattcaccggaaaccgaga

SEQ ID NO: 220 - DNA, 358 bp, Cronobacter malonaticus
tgcccggcgacgcaacgctcaccggtaagtaaacgtcacctggaccgccgtatcgaatgagcctggtgcgaaagcgtcggtggtgcggatgtaccgtgcgctaaagtcccaggtggcgctgtgcgtcgtggggtcgacgggcgcagtggcgggttcaccgtctggcaacatatacattccgctgttgctttcaataatctgtaacgccagcccgcgtcctgtaccattatttaaataagcgttattttcatgcggatctcttactccgctaaaggcagcctcaacggctgtgatcgttgcagggcagttgatcacgctcagttcaaaaggcactctcggcccccagtcgtggggttgt

SEQ ID NO: 221 - DNA, 236 bp, Cronobacter malonaticus
agcgcctcacccatttctaccgttttgtttttactgccaccttccacttcacaggacgctgccataatggcaccgttaatttgcagatgaatatcgtcggccagtgcctgcgcagcggtgatggtaaggatcatcagtatcagtatttgtttcatcgcccaggctcccctagcggtaagcgaccgtaatcgtggcgacggcgttagccgagcccggcgttacggtagcggcggtct

SEQ ID NO: 222 - DNA, 127 bp, Cronobacter malonaticus
tgtcttatgagaaggtgaggcggtgactgttttttattcgtattacatgctgtggcgcgggctgcaaaacgaaacaaagcattgaggcgcttctcagcagacccctgacgcattaatgaatgacggt

SEQ ID NO: 223 - DNA, 399 bp, Cronobacter malonaticus
tgccatcccctgaatagagtccgtaacaggagtaaaaaaatgaccactttttacccgctgttatttatgccatcttttatttgtgcattgtgatgaataaatgataaatgacctgtgaggctgataacgcttgcgtggttaattaatactcagaattacaaagggataggaaaatatatctatgtcacataaatatatactcacgagtaataatctgatttgaaatatcattgattaaacatatatattccatgtatgagttaatgaagttagcgtcagaaataaattgctagttatctggattttttaaataaaaatccagcggggaattgtcagattattggacaacggataatatgcgctggctttaccctgtggcaaaaaattatttattgaata

SEQ ID NO: 224 - DNA, 105 bp, Cronobacter malonaticus
acagtgcttttttcttaaataatgatcgggaaatcggcatgcgttatctggcgctgccggtagccgccgcgctggtgctcgccctgggtggcttttcttgtgctt

SEQ ID NO: 225 - DNA, 287 bp, Cronobacter malonaticus
cgtctgcccgtttcatcggtggcgagtgtcactctggcaccacccatttgggagagatcggcagacatacgtttttccttaggtgtgggtcggttaataccttctgtttaacatgacggcgacacaaacgggatgagacgcgtcttatccaggcgtaaaagtgagcatgccgtagcggaacgaataaaaaagccaggcgcatcctgtcgcccggcttttttattgagaaacacgttaacggcgctgccgtcttatttcgcgttccggctacctgaaccttttactct

SEQ ID NO: 226 - DNA, 279 bp, Cronobacter malonaticus
aaagtaaaaaaacgcaaagaaatgcaggtgggaggttattgtttgttaacacattctgcctgttaaatggaattgagatcgcagcgtaatttctctattaaaaaaatgtttctagtttaacttttcttttgtgaggttgttaacagaggagaacagcttgcggcgcagatagacatggccgggtatcatcgcgcataaattcagcgctattcagcatagttaaaagcaccagcaagaccggcgcttttaaccggctacaaaaacagggtttagaatggc

SEQ ID NO: 227 - DNA, 225 bp, Cronobacter malonaticus
tggttttaccgggcgggaagagatcgcgaaagcaaacatccccgctgacaatattgaagccagggtgcgtaagaaaatagcgtcacggctttactgagccgcagaaaatatattttgttaaagaaagaagtcgcgcgtgtttttttaacgcgcccggagatttattttctgctttactggcggtaagcgataaaatggactagcagcataatattgcgcaagtct

SEQ ID NO: 228 - DNA, 113 bp, Cronobacter malonaticus
ataagctacccgcaagtcgccgtttttcaacgcattttcaagacgaacaggcagtgatgtctgtttttttcgatacagcgccaggcaagcgcagagcagtgacccgaggataa

SEQ ID NO: 229 - DNA, 113 bp, Cronobacter malonaticus; identical to SEQ ID NO: 228

SEQ ID NO: 230 - DNA, 115 bp, Cronobacter malonaticus
aaagcgttatgggaggcgggcttttcgccttccggcacgcaggtgccataacgttatccgcgcgggccggtaaaacaacgtcacccatcataaggattttctgaaaccgctaaaa

SEQ ID NO: 231 - DNA, 138 bp, Cronobacter malonaticus
ggcctccgggcaccggcgcaccagcatcagcacatgttttcagggatacacctgctatttccaggtgttttacaaacggcctcaggcatgttctgtttttattctgcctgaagcaatatcaataatcgcgcaagaaag

SEQ ID NO: 232 - DNA, 171 bp, Cronobacter malonaticus
tcccggaaaaagggccgaatggctaaagcgaacgacatttaactgttttagttacaacatactttatacgatccaacgaatctgctgtcacgtcagcgctggttgtttagctagacagggaagaaatggcagagcgaaccgcgtgaaacggcccggtacaggtataaaaaa

SEQ ID NO: 233 - DNA, 162 bp, Cronobacter malonaticus
ttgtggctggctggcactgctggcagcggcggcttacgcatggctggcaccacttttacgcgatgttaatcagatgaaaatgcaatttcgacagcaggcggttgaactgcaagcgctacagcgacggcaggccgcgcaacctgatcggcgagacgccatcac

SEQ ID NO: 234 - DNA, 116 bp, Cronobacter malonaticus
acctgccctaagtgccctgtcgctaacccaggcgaccagctaacttaaagtatgttgtaactaaagtgcgtgtgcaagccagccgcaacaagatatgcggtagcaggagcaaatca

SEQ ID NO: 235 - DNA, 192 bp, Cronobacter malonaticus
gcctgctataaaacagagctgtcaatatcctgccgcgttttacagaagcatgacgtatgaatatcgcctgttccctctttcggctgtcgttgtgacgataaagaaatttttaacttattctcttgcgtacagcgcaacgctaacctgctcgtaaaatgcacgttcaggttgttagcatctataaaaaagcct

SEQ ID NO: 236 - DNA, 187 bp, Cronobacter malonaticus
gcgcccctcagcaaacccgctggccatgtggtgtccccctgctctggcgggcgagaagaagcgcaaaagctgatataccggataaaaaaaagccgctcctgattagcggcttttttatatgttttatttagcggcgttaatattcgcggccatcataaaaggcgatatgcgattattctgcccaatc

SEQ ID NO: 237 - DNA, 127 bp, Cronobacter malonaticus
atttgggtctggcgctttaccaggcgtcgcgctcgcctgcgtgtcggcagaaactctcgtcatcgctttaagtatgttgtaactaaatttgtggtctacggtagcgtttatcccattaattcacgta

SEQ ID NO: 238 - DNA, 112 bp, Cronobacter malonaticus
ggtcagaggcggggtgaaaagcgttaagtcatgggcagcagtcagcgataacagcccgctgtacgcacgcaacgcccggttctgcgtttagtgaatacagagcatcccatca

SEQ ID NO: 239 - DNA, 103 bp, Cronobacter malonaticus
cgaagtgatgcttaagcggcggctcctcagcctggcgctgcactgctggcggcgtctgcgcaccgctgacatcaaattcctgatagtcgccatcaccgtcttc

SEQ ID NO: 240 - DNA, 135 bp, Cronobacter malonaticus
gttaagcaattgtgtggccagacgcaagccatgtccttctgtctggctaatacctgtgtaggtaatagcgtgacataaagacactgggcgaaatgcatttataaaccgcacatgaagaaatactttcgtgtgcag

SEQ ID NO: 241 - DNA, 101 bp, Cronobacter malonaticus
ggacatcgtggaacaggccagctgacattttaatttagccgcgccctcgcccgggggcgcttacgattctcccctcgcccattcgctcctccttcgccgcc

SEQ ID NO: 242 - DNA, 123 bp, Cronobacter malonaticus
caatcgaagatttattagccagatgtgacggcattcaagctgcgcgcttaaggcaaatctgttgaggattaaacagatgagcccgagcaagtcagaaagaagcgtgaaatgaggtcaggacag

SEQ ID NO: 243 - DNA, 860 bp, Cronobacter malonaticus
gttcctgccctgcaaaataaaaaaccgccgtgaaggcggtcgtgttatcagcggtatttcacctggcggcgattactgactgatctcgctttcattcagcgtcaatggttgaaccttgtcatccgtcagttcaaaccccaccacaacatgccgtgacgcgccatttttattttcccgcgtgggaatcagcgcatattcgacaatataaggcgtctgctttttgaaagcgtaaaaagacggtggcagacacaattgctcatcttcaacgttaagcgcaggcttttcgcgataccatctttctttgggcggtgtattgcgcggcgcgatgataataacagagggctgataatgctctgcatccggagcactaaagcagacattctgcgcaatccgttttacggtagtcgtttcgctgggagttaatctgtccccctgccctggacaacccgccagcataaataccgtcagaagccataatttcggcgctttaaacataaggaaatcctttcagggtgtaagcgtatcgcgcgctgactgtggcttcatcaagttcgccatcgtaagaaaggttggtaactgtcatgatggatccagactttatggtactcaatagaattatcaaatacagattttgctaatttgatttcaccaagggttaatagcctgagacttccttcctgttgagcttgctgtgtcataaaaacctccttttaaaatcatgcagcccctgtaacttattattataaagtaatttattcatatacacagtcacaaattttaacaggcaatagcctctcgtatatagaaatagatttataaagagatgaaacaaacgtggtgagtattgaatgctgattcat

SEQ ID NO: 244 - DNA, 142 bp, Cronobacter malonaticus
tacttcggatttaacatgctacaccaatacgtttctgaaattcaccgggtcagtataaaaacataggctttatatattttaaaaacctgcattgataccaatatatgcccaacaaagtgacttcaacaaacttgcattaaac

SEQ ID NO: 245 - DNA, 149 bp, Cronobacter malonaticus
tacagataagtaaaaagagcataccgggcaacgtggataatgattaatgcaccgtagaaatggcacacgaaaaagatgaagcattcagcatctaatctggttttaattttcacacgccgaaaccggacttgttgaccaaaaaaaaatta

SEQ ID NO: 246 - DNA, 185 bp, Cronobacter malonaticus
tgggtagttatttgatgataagtatcttcataaaaaccagttgtcatgcgccccgggcatcaaccccacccagagttattctttgtaaagaatttcaaccttctgcgtaaaagatagataaaaataataaaaacaaatatcaaataacccccgcaaattattaatcacagtcacattcccacccc

SEQ ID NO: 247 - DNA, 101 bp, Cronobacter malonaticus
tagcgcgcttactggctacgtttaaggctgttggcggcttcgggcgctggcatcagatgtaaaaaaagcccggagaaccgggcttgtcatcagcaaaaaag

SEQ ID NO: 248 - DNA, 125 bp, Cronobacter malonaticus
tgtgagggcgtactggcgggctatttgaaggaaagagcagatgaaatggtgttttgattagtggtaattacaagcacttaagttttaaaagtgtataaaaaaagcctctgaggatcgaacgaccg

SEQ ID NO: 249 - DNA, 111 bp, Cronobacter malonaticus
tcgcagccccgggcgtgcgtaaacctggcgcggactatccgctggtgcggcgggtacgggcgtataccgtgccggggtgcgggcgcgcgtgcctgatgtgttgcaggaagt

SEQ ID NO: 250 - DNA, 189 bp, Cronobacter malonaticus
cacctgatggcaccggcctgcacctgacgcctgaacagcagaaacggctgctttttgcctgaacacgctatctgaaacgctacggcgcgccaaaaacgtctgcgtaaaagattctctgccgcaccaggcgagatgtcattgcccatgaaaaaataacccattgaaactaaaagcaaatcagtcagatgc

SEQ ID NO: 251 - DNA, 203 bp, Cronobacter malonaticus
caacagccaaaaagctaaaaagcatgtttttaatcacagtttatttttaatgcgcacgagaaaggttgctgatgtttttttaaagtctggggattaactcaaaggaagggaatagtaaacctggtaaccgatataaaaggtataattacgcctcaggcattattagcagccaaagtaagcgcgctttgcttaaccggcaaagc

SEQ ID NO: 252 - DNA, 182 bp, Cronobacter malonaticus
ctcatagacgagttgtcggacactgttatgccgtgaaataaagaatgtgaatggcgcagggcagcctgcgctattcaggtatgagatcagaaaattaaaggattgatcgggctatttgctgacgactatcgcgttttttgctggagtttattatttccgtacgccggaatcagggaagctga

SEQ ID NO: 253 - DNA, 165 bp, Cronobacter malonaticus
agaaacagattcatctgcaaacacgggcagcatgacggtgagcgtgacacccgccacaatcagttgagtaatccttttcatcacgattcctttgccgtccggttaatttttctctttcagcagcttcgctgtgcaggaggcaccgttacagctgaactgcagatg

SEQ ID NO: 254 - DNA, 127 bp, Cronobacter malonaticus
cccgccctacgcagtaaatgccagcgataaaatttccaggcaaggtaaccgaaacgcactagtcacagtacaacctaacgtagcgttaaaatctgtagggtgggcaagcgaagcgcacccgccgtaa

SEQ ID NO: 255 - DNA, 129 bp, Cronobacter malonaticus
ctatccctttcatttggcgattatttcatcgtgccagttaaggaagaaagcgaacgcggttagccattatggaaggtgccgttgcggtgaaggcttgcaggctggcgtactatcagacagaagacattc

SEQ ID NO: 256 - DNA, 389 bp, Cronobacter malonaticus
cattaatatattataatttaagtttataccttgcggatatgtaaaaaccccaataaacaaggctttttaattataatgcaacggtttttttaaatgctgtcgtacaatttatttcagataattgatcgtaattatcgagaatgattatttattctttaattaagtgtggccgttttttaacaggctaaattaaataataaagagtaaaagtgaccaaaaatagacaaaattaatttattttaatcataataaacaacacaaaaaaccgaatcatagaatcgcaacgaatactcaattaaaaaaagatccagaagtgcagcgccgcaggctgcacctctgtcagaaagaagatgactacaccgacaattgctgtcgaatctgttccggaa

SEQ ID NO: 257 - DNA, 254 bp, Cronobacter malonaticus
gaatgtaaagacaggaatcattattataatgaatattcaagcaggagataaaacgttaaaatatccactaataaacagctaatgtgtcgttaagagatgaatatcaacagcaacccatttagtatcactagcataaataagttccgcgaaatctattaatatccgacagaaaaaattcaacaaccacacttacaatcttttgattaatgcttaagaaaaacctcaaaatgaatactggtaaaatagcggaggaa

SEQ ID NO: 258 - DNA, 691 bp, Cronobacter malonaticus
ttcgtcccgtacgcgtctcacacatcaggacaaaacagtactcatccaccgttaaatttgcacaaagttgcattattacgtgtgcgtttaatgccagtaccgtttgctacgcagttatttaacaatttcaccagcaacagagcctgtcttaacggaaagcgttattaacaacgccgtgatgatgtgctcattataaaaatcgtaatttctgtaacaatacacgaacctgtaaccgccaccatgaataactctggaatatcataaaaaagcccttcaaaaataaaggcatggacaatatatggacgatttcctaaatatcagaaatgagtgattttttgtaaaccataaaatagtaaaaaatattggcacagagataaaaatattccccacaataaaaaatacagggtgagatgattgttatttattattaatttgaatgaaaacagataagcggaacccggcatgacggggataccagaagagtgatttacgcgttcatcttacagtgaccattaccatcagcggcggactgttagccagaaagactgactaaagggatatgcatattgcaaaggaagggcgcatttagtttttctgacaatgctatcgataccgtgaagttagcatcagaacccagtaaggcagaacctgttgtagcgcttctgtcagggtgtggtattcctgtgggtat

SEQ ID NO: 259 - DNA, 149 bp, Cronobacter malonaticus
tactttacttaagctaaaagctcttgttgtaaaaggcttttaacctctccacacgctttttatttctgcattacatcgaatttttattaccaacggcgaccccaacaattaaatctgagaatggtaatttgtagataacctatccatat

SEQ ID NO: 260 - DNA, 559 bp, Cronobacter malonaticus
ccccctcccagagcaagtaaacacaaaagattatttttaatgctcaaaaatatacagaagtttttttaatcaaaacccctcatccatcaaaattatgaatacaataaattttatttttttatttcgatagcgaagcacaattaatcaagaaactatagtcctctgaccccaataattcctcactgaatttctatgcgaaatgatgacaggaccctgattaaacttcttgtcaatcactgctttggtagcctctgatgattcagggctcgaaaagacccccgattacttaccatcatcagtacaaggaatagtagctgtgcaaaaaaggataccagcgctggcattagaatgaatatcgttaaatgactctttttttttgccgtttttaacacggcaagatccgtaaatgtctccagagctttggaagtgaagagcttaagatagcagtatgcgaaagagagtcgcctttaacgatagatattgcactagtttgaaaatttgtgaagataataagtctcgatgatctgtgttaatcatcgggtttgctctcattgttagt

SEQ ID NO: 261 - DNA, 223 bp, Cronobacter malonaticus
ggtaagcccggcccagaatgtgggtatagaaatgttgtttaacggtgcggtcatgcggcctgatttcccgctggatctgtcattgccaaatcaaaacagctacgcgctgccgctcacagtgcgttatgcaaaaacaggcgataacttaacaagcggcaacgtcaaggctcaaataaccttaagaataaattatctttaaatcatttttggtacgtctgggcat

SEQ ID NO: 262 - DNA, 2265 bp, Cronobacter malonaticus
tattcagtgctgaatggatatttcattcattttagccgtgccgacatcttaaccaatttttaatggtcaacgcacagactctgcgagaataaagctctcagcacagagaattgttgcaggtgtgtacaggctaatatgacaatacaaatgaaatatttttgatttttcgcagtaataagcagggccagtttgctcggcttatgattcatgtcatgtataggataataagcatgagaaagtctgttgtttgcgccttggtttcaacactctgttttatgagtgccgtacatgcggaaactactgataacgttatgtccacctcggatatcattgttgatggtgccattacctccggagatggcgcatgtaccgtcttgatggataaagatgtggttaacctgttggccgacaaaactaccattgtccctcagagcaagaggaaggccgatcattttgacggtacgttttccgtttctatgacaggggatgagatctgtatccggcgtattcaggaaggcaaaattgctgtccgctttacagggcctgccgatgaggttgaaggcagcgtttttgctaatacagcgaccggtgaaaatgcggctaaaggcgttggggttggcctgtttttaagtagccttggacgaatcgcgattaatcaaggggctattcctgttacacctaaacctttgagtctgagtgcgcaagtggttggccttaccggtcaggaagttgtcgaaggtaatgtccaggcgtccattacagtagaagttgttcgcctgtaatcataatgcttcataacaacctgggataaagccatctcttaaatgcaataagcgcattgtctttttccggggttgatatcaagacgtattttcctggcattatttttatagattatcaattaacaaaaatcatgttctggagttatgacatgaaattagctttaacggggttgatgatctcgaccttattgatggcaacggttgcgcatgcacaaatcagcgcctccgatgtgcctgcaacgctgacgattacgggaattgcaagaggctcctctgaggcaacctgcgcgctggcagccaatgcaagcgccatttatctacgcggcgatgtctctaatctaatagagctgggtgatgatgccgacaacatgacctttgttccccttcatattgaaggaaataaagagtgcgatgctctgattgagcagggaaaactgtcttatcgatttttgggtaccgcagatgacagccagggcagcgcactcgcgaatgccagtaccggagaaaacgccgcgaccggtgtcgctattgggcttttcgataataaaggtaaacccgtcagtattaacagtacggcctatacggtgtcaaaagacgcacagcagggtattggtttccaggtagtgaaactgaaagaccagacggcgacagccggaacggtacatggcgtgctaacgattgacgtagagcgtttgtaaacccttcaggacgtttaatacccatcgtctggaaaaaaggcaaggaaagcataaaagaagttagctggaggagtagaccatcatgtttattcacatagcaggaagcgaaagccagcagttctgtttatctatctctgagatatttattacatcaataagtcaactgtaaggaaacaaagatgaaacttaatttattacatactgcactcgccgcattattaatggcaggtacagcgcaggcaatggcgcaaactcaggacgtaccggcaaccgtctccatatccggcgtattaaacaatgtcaacgcaggctgcgttgtcacgctggataaagaagtggtttatatggaaaacaaagttagccatctgccgctgcagggagaacagccctataaaccgaccgtggttaatgccttcatttctggcgaacataaaaacggtcaaaataatgtcgtctgtagcgaagctgtcaaggctggacatatcgcgctgaaatttaccggtacgccggataacgccgatggcaatgtgctggcgaattcctatgtggaaagcggcggcgctaaaggcgtgggtgtaggtatttatggtccgacaaaacaacccattgaggttaataccggaacacttgaaaatcttaccgtcttatccgatcttcgtggttctgcggagttcaacttagaattggtaaaactggccaatcaggaagtgacgccgggtgcagtgacgtcttcactgaccgtagaaatcgagcgtctgtaatattcaactcctctcctgcgggag

SEQ ID NO: 263 - DNA, 440 bp, Cronobacter malonaticus
taaagtaaaaatcctaaacattttctcgttagcaataaaatccattctttcggttaatgtatttaacgcacgattcaaactgaacgtagcgctgaataaggggtcattcattattacattaaggagcgatcgtgaataaaaggcatctggcagggtggctgttcgctcttctgctctcctcaggcacggctaatgcgaccacagaggatgtttcggcaacgttatccgtctgcgggaaagtaaactcaacatcggatcgttgtcaggtcacgctcaataaagagatgctttctctctataccagcgtttcagatatggttaatcagggtagcgacgccaccgatcctgaattcactaatatttatatcagtaatatcggcaacggtgacagttgcgctcaggccgcacaggcgggccatattagcgtaaggtttgttgga

SEQ ID NO: 264 - DNA, 299 bp, Cronobacter malonaticus
aggacacattacccgtcccggacgccacgggaaaaaccgtttttggtatccaggctgtcaaattaaccaatcaggccgtttcgccaggtacgctttacggccgtcttatcatacagattgagcgtctttaacagatttctcctcttaagcgggagaggagaatccctcatcgcaaatgcttttttagctcctctattattacctttcctggcggcccctccatgaatgatatccgccggacgttattgcattgtttctcctgatagtgtctgcccctccgggcatcggcgtgccaccac

SEQ ID NO: 265 - DNA, 103 bp, Cronobacter malonaticus
ttgttccagggacggaatatgtctttaattcagaaagtattattcctcaccacaggtctcacggcggtgctcagcattcaggcgcagccgcaggagcctcctg

SEQ ID NO: 266 - DNA, 160 bp, Cronobacter malonaticus
aggggttgtctctgactgatgtaaacccaacggcgagcgagacgatgaaagcattctttgtaatgcttaaatcagaagcgttttgggcacaggaagcacataaatagattgtaaaacgcacttgggcgattttgtctcttagcgtcatcgctatcaacag

SEQ ID NO: 267 - DNA, 107 bp, Cronobacter malonaticus
aacgtctgccgctgcaggaaacaccaggttaacggaaagcgccgccacggcgggcgcatataacataaggttttgccgtaacggttgaggcgtcgggcgttcgtgaa

SEQ ID NO: 268 - DNA, 236 bp, Cronobacter malonaticus
tttgtctgttatgggtgcgcagcaacgaaccggagagtgggccgggcgaccgtcctccaataccagcggcagttaaagcctttagccgtacagctaataccagccagtctcctttaattcttcctgcccctgcatttctggatctgaataaggctctatttgtttcatgtctgcatagtcatgccgataaacagcgtgtctctgcctcattttcgagaataaagagtaaaagaaaa

SEQ ID NO: 269 - DNA, 109 bp, Cronobacter malonaticus
aaggcttgcatcaatacgttttgtaaatatatggcaaaatataaggcgtttgacgtgattctgaaactctgctgattcagcattcgaacataaacggcgtaaatcagga

SEQ ID NO: 270 - DNA, 126 bp, Cronobacter malonaticus
gcaaaaaagcgaaacgatccgggttcaccaataaggatcgcaacctaaaagggaatacagaaaggcgttatctggaaatgttactgacaactctttgacaaaacgcactgataaaagagaaaattt

SEQ ID NO: 271 - DNA, 179 bp, Cronobacter malonaticus
ggcaatcacgtccacaagaacgctcgtcgccgaaggcgctggaagctgggaaaccttctgattcacgcccaggtgaataaaaagcccggccagtgccgggctttttgctgttcagtgaagcgcagacataacgtgaaccggctacgttattctggcttcgaatcggttaaaaaggtgat

SEQ ID NO: 272 - DNA, 167 bp, Cronobacter malonaticus
acactacgggtgcttattttggcttttctcttaatgcttacatttcctgatactttcctgacaatatctccatagttttttaaacaggccagcaggataagcttttcattaaacgataaaactccgttttaaataaatggaataaaagacgtaccaataaaagcggt

SEQ ID NO: 273 - DNA, 126 bp, Cronobacter malonaticus
tctcattgcggtggcgagccgctggcaggcatcctggcagacaaagaaaatagtcaatcgcgttaatttatagggacattaccgggaattgaggtgtgcgtaaaaccgttatttataaaaagaaaa

SEQ ID NO: 274 - DNA, 169 bp, Cronobacter muytjensii
ttcgcataccgtggcggagcccgcgcagtcgtaatcacgaaaatgcgccgttccggcagcgtggccccacagggcgaggctaaagatattaagcagcgatgtggcggataaaagaggacagcgtaagcgtggcgcaagcaggatgaagggcgcggcaggagaagagggt

SEQ ID NO: 275 - DNA, 176 bp, Cronobacter muytjensii
cgtcggcgacggtgatgtaaaaaaagcggaggcgcagggcgcatccgctttttttatggctttggttttattggggtaatggcggctggcgcttcgcttcccgcccggggcgtcatggtcgtaatgtgagcttcaggagggggcgaccgctaagcggagcgcgctcgccattctgg

SEQ ID NO: 276 - DNA, 102 bp, Cronobacter muytjensii
acaatcataccgccaacatctctatttgagaacaatcttaaccgttaattgataaatttataaggaatgaaatgtcacttactaaatctacccttatctcag

SEQ ID NO: 277 - DNA, 107 bp, Cronobacter muytjensii
cgttatcctcgcaggcgttgtgcagggagcgctggtggagaccttcgggcattatgctgtctattatgtgattgccggggtgtcagtgttagcgctgtggctgacga

SEQ ID NO: 278 - DNA, 103 bp, Cronobacter muytjensii
tctttatggtcattttttgccgttccgatggcattaaaatattcatcaaaacaattaattgcggcggcggataagtgagttttctcttttaaacagattttct

SEQ ID NO: 279 - DNA, 122 bp, Cronobacter muytjensii
tggatggaggagctgttatccaacgtctgccgtcgctgacgcgccccgtttttcttttattattgtcttttgtagcattttatcctgccctgatttaccgcctcgctgcgcctctgtttatc

SEQ ID NO: 280 - DNA, 113 bp, Cronobacter muytjensii
tgaccgctgcgcactgtgcagaagagatgtctcatccgggattagtcgtaaccaatcatttcttatgtgtaattttgtaactgtttctcgcgacgcggaggctgccggaagca

SEQ ID NO: 281 - DNA, 138 bp, Cronobacter muytjensii
gcgcactccgctgcggcttccggaggcgctgggtacgctgacgtttggtggcgagggcgacagcgtgcgcgcgccccgaccgggcgaaaggctgtcggtgcgcttcggcgcgccaggcacgctttatattgtcgggct

SEQ ID NO: 282 - DNA, 205 bp, Cronobacter muytjensii
ttgaggttttcccggtcgggctggtgggcgctgcgtttactcacctgcatgacgatgaccggcggggggcgtagggcggggaagcgcagcgcgcccgacatccgcaaacgacgctaacggcacctcccgtccccatccttcaaatatgtctcgcgacgccgcaaataaaaagggccggagggccgcctttattctgcattccgct

SEQ ID NO: 283 - DNA, 3401 bp, Cronobacter muytjensii
ttcttataaaatcattcggttacatttttttgctttttcaaaaattaatgtgcattttgcgcgttgtgaatttggcaagcttatggcatacctaatttaatatcatagttatcaaacttatagagcttaaaaaagagcctaaaaagaaatgctattgtgctatttcatggttcatgtgatttgaagttagtctctttgtaaaggggcctagtagtataggcttatgctataaataaattaaatgtttgatatataaggatatttacatcgcagcatgagttgagaaatcttgatacgctgtgcataatgttagattgagatgcacatgaataattgagttaacacattgaaaaaaaatacaaaaaaaatcattgaagaatatgttaatggaaaaaaaatgcatccattatttataaatggtgatgcactatctattctcgagtcatttcctgatgaatcaataaattgcgttataacttctccaccgtattggttgcaacgagaatatgacaatggtggaattgggcaagaaaaaagcaaagaagattatattaaaaatctcttgaagatatgctttcagataaagagagttctcaagaatgatggttctttctggcttaatattaacgatacatattataaaaaaagtttatctggcataccatggcggattgctatagccatgattgatgaacagaattggattttgagaaacgatattatatggaataaattaaaagggggaatggatagctctaaagatcggctcaataatgttcatgaaaatatttttcatttcgtaaaaaaagagaaatattattataatatggatgctataagaacaacttctagaaattcatatgtaaagaatggggctgtaatttcagccacaggaattacaggtgtaagctataagcgcagaatagaattatcgacgtcattgtctgacgatgagaagaaattagctttagctgctttggacgatgttttattagaggttgctaataataaaatatcggactttagaatggtaatacgcggccaacatcggactactcactctgataaagttaaagtgtcaggacgtgcgagagaattacaaaataaaggattttatttcttaaagtatcatcccaaaggaagtaaaccgtgcgatgtctgggaaataccaccagaagatgcacataaaagaggcgctcattttgcaccttatccagaagacatttgtaagataccactaatggctacatgccctgaagatggaatagtattagatccttttgtagggactggtacaacaactagtgttgcctataaattaggatataaatctattggtatagatctttcggataattatctactaattgctgaaaaacgtattaataaaaaattactttaaggagtttagaatgtctgataatgattatgaagttaatagttatacttttagtttaattactcaagggcgacataagttctattcccttactttatactctgatgtattagctgaaacttgctttgttacaacaagatatgatgacccacttgagggatttcagcgtcggcttgatgaaaaaagagctcaagaaatcgctgattatatagatagtggatttggaactatacctaatgctgtagtattatcagcacagcctgaagctgagttgactgtgaaaaaaggaggacgagctctcacaataaaaatgcaccctaaagcttttttagtgttagatggtcagcaccgtgtttgggggtacaaattagctaaaagtaaacttcgaattcctgttgttatttatacggggttaacgaaagctgaagagacaagactatttatcgatattaataccaaacaacggcctgttcctagtgaacttcttctggatattaaaaagcttgctgaattagaaggggatactgatagtctgttacgcgatttattcaatcagttccaaaaagataaatttagtgttttaactggtttgctaagccctagtgagaaggtaaagggaaaaataagcagaacgacatttaatactagtttttcaaatattttgggtgttcttgggaataaaaacgctgaagaattgttcgagatatttaatgcttatctaggcgctattgttgatgcgtttgaaaaggctggattcaagagtgaaataacaactccaaatatttttaaaggtgtaatatcattctttccagaagttgcatcaagagtaaagtataaattcaactctgaatatagtaatgataatttctcggaaattatagaacctattccattagtattgaataaagggctaattacaaaatcaaaaaggtcttataaaattcttaccgaagcattgaataactcattgacaaaaagtttccagttgtaagcggaggagataatatgtcagcagaatcagatatcttaaggccatattacatcgaaggactgactagtattagtggcgtaacaaacaccactttcaaaagttggattgaaactgcacctcaaattcttgatacatatgacattggcttgaaacaattcactttttatattggtgacaagaatgcgttgttaagatctattgcgcatgatatttccagaatgacaatagcaacttttgagtcaatctgtgatatatctgctgcgtatgaaattccacgttccactgcttggccgttgattcgagcatattatgctgctttctttgctgctcatacacttttacgaattttagggtatgctgtagttcagttagaaagggtgcaatcggacaaacttacaaccgctctaaagtttcattcaaatccacctgctattaatataggagatggacttcatttggtaatctttaataaaggtctttcatctttttcaatccaaaaattaaataatggttcacatgaagacacttggtttgtcttggcagagttattagttaatatatctaggcaatttttacttgacaaaaacccagtaagtaaacaaaaaaaacaaacgttatttaatcaaatggatgaattagtcagaattatgaggtcacatccatgccatcatcgtgcaaattggctatcaagattgaggaatgaggtaaattatcagcataagcatggtacatggtatccgcatgaaaagtctaaaaattatagagaacatgtatttgataatttgactgtatggaataaaagccctaatttaacaataaatgctaaagcccattatattgacaagtttactcaagcttgtacattcttggttgctctcgttagagaattaatttatgacatttccagtagaaatgctgatgatgactcctttttgaaaatcacggcactaaaagcaataaaacaagcagagaaaaaaagaggttgaatcatatgctaaatataatttttct

SEQ ID NO: 284 - DNA, 174 bp, Cronobacter muytjensii
cactcactctgaaataacgcggcctcgcgacaccaccgcgccccggtttgcacctactccattcccacttcgctgacttgcttgcgattctcctgattccataacgggctatccctgcctgatagcggagacatcacgccatcccatgctcaaaaagcgccacgcagtaaagta

SEQ ID NO: 285 - DNA, 153 bp, Cronobacter muytjensii
gtcttcagcgcatggcgcgcaggcgcgagcgccgcttccgggcagcgcatcaccggccgctgcaaaagcatagactctgcggggttatctggcgcggcgcggtgttgcgggttgcagcgtttcgcgatccctgccacagaaaaagccaggggg

SEQ ID NO: 286 - DNA, 195 bp, Cronobacter muytjensii
gggttttggggtccattcagtctggatttttttgaaaacaacgtttcattatggctggcgctgtccgcatgacggcttcggcccgccccgcattacgccaccactggttttttctcggttttatgcttttatctcattgattattagtgctatttttccgtagtgggtgtcttccccatagcgatcgcttccccg

SEQ ID NO: 287 - DNA, 151 bp, Cronobacter muytjensii
ccctcaccccgcttaccaccggtcttgtcaccagtctatccagccataatgaaacgttgttttcaaaaaaatccagactgaatggacagacccaccagtttgcccctggcgggccagcgcgcgagggtcagatcccggcggtctccaggat

SEQ ID NO: 288 - DNA, 458 bp, Cronobacter muytjensii
ttatcaggaaatgattagctggatgataatcagtatacataagccattgttatattgtgggtaataaaggcgggcgcttaactttatttataaatgcctttcacggaaatatatccgctgattctcttcccaatttcctcatgcgtacttctgttaataagaaatatttatgttttgggcgcagtgctgtcaggtttctttgggctgggcggcgggactgaccgcacccgttgccaggcagaggattgcggtaaatactcttctcattttcgcgcggtacgccgctgttaaggcgcgccgcgcaacatccgactgctaaggagaacatgatggcaggggaacatggcgcgcgaaccagcgcctttcagctggaggatttcctgaacggcgactacttttatccggccatgacagcacgcggcgagtatgcgatggtaggtggaaacatcgcggttaga

SEQ ID NO: 289 - DNA, 140 bp, Cronobacter muytjensii
gcgataaaccagcaaacctctgagtggcgaaaggagagacgaatcacaaactggcggcaccgtccggcgtaaaacgtgacgcgccacacaggagattgcccgtagcggggcatgtcaggttatgatgcagggctcacgac

SEQ ID NO: 290 - DNA, 107 bp, Cronobacter muytjensii
acatcgcgttagcgctgtggttggcaacgcgctcaggattaccgtgccgctttactaattttcctttaatgacaaagcgatacgaatttccggtcgtaacattcttt

SEQ ID NO: 291 - DNA, 194 bp, Cronobacter muytjensii
cgcccagcagcagcgcggtttccggacttatcatgaacactccgttaagcggcgacgcgaaaaggcgaggtcaggggtggtttaaaggtagcccgccggggcgagcctgaccaggcggagtattcatatcagcaatttattctcctctgggagggcggcgtctgaaacagggaggcatccctaacctgctgaca

SEQ ID NO: 292 - DNA, 130 bp, Cronobacter muytjensii
tttaaggtcagcttcgcccgagaaaataaaaaggtgggtgtggcttcgcctaccttcctcttgcaaataaaaaagacatttgaagcaggtagggcgggtaagcgcgcccgccatcccgcacatcgccctc

SEQ ID NO: 293 - DNA, 159 bp, Cronobacter muytjensii
acctgtattttataaccggtggctatgttatttattggaacaataagagttatatttttatctcaataaaccattgctttttttatgacggaatcatgaggttttctcgcagacaaggcagcaaaaggagcggggggatattcgctgctctgaattaaa

SEQ ID NO: 294 - DNA, 196 bp, Cronobacter muytjensii
cgcgttaccatcgccggggatgcgcacaccaccgccgatcgtaccgcctcatcgagcattacaacgagatgtggcgcaacctgacgatgcctggcaatccgctgcgcgtgctgagtaccggggagatcctcactgcgtggcaggcgaactaacgcgcttgcggtctgtctcaccacggcgcgagcgtgggccgcgc

SEQ ID NO: 295 - DNA, 177 bp, Cronobacter muytjensii
atttgccgcagccttaagacgtaacgcaaaagctgtaaataattaaactgccgccgcgcgggggaattaatttcttacgtcaggccgctgttaagcgagggcggataatcgttttcttagcggcattgctttattccagtcagtaaaacgtttcgctcacgggaattttttgtggcg

SEQ ID NO: 296 - DNA, 521 bp, Cronobacter muytjensii
tcataaacaggtgaagggggagccgcgttatttttctgtcacatgattgcgctacgcttgcgacacagcgttattcgccagcgctattttcaggaggcgttattcccgttatgtgcatcaggaaataccctgcgatactgccattattttcagaccctttctccctttgtcgcgcgctttatcctgcaggtatggcgcttttgtaataataattttactgtatcacgatttcgttaattacgccctcctctcctttgtcagtacagctatttttatgtgcgtcataagcttattgtctggctgacaaatacgacgacagaaataaccggctgcgatttttctctcttacttttatatagcggcggctggcggctgtacgctctgtgctcgcctgccgatggcgcgccgttttccggcgggttaaaaagccgccagcctctctgacggaaacaggaaactctctgattgtccatgagagaaacggcggattaacgttgtgttgttttaaaaatatggcgctt

SEQ ID NO: 297 - DNA, 177 bp, Cronobacter muytjensii
ggctttgctggcgatcgtgctcctgttgccagcgtgtcgcctcttcttcggcgccgggtcgtcgtggtccggctcggccagcgacaatgccgccagctgggcgcgcagtgtctcctgctgggtctgatacgcgctttcaagcgcggtgagctggcgctgcgcgctgtcgatggccgc

SEQ ID NO: 298 - DNA, 158 bp, Cronobacter muytjensii
taacgcattacgccagtaaaaaccgcaggccgaaacctgcggttttttttcgcctgaataatgattaagcgaaagcgcaggtgccacggtaataagcgcagccgtctggctgatgaccgtggagcatcggtgatgaacaatcataaaaactggggttt

SEQ ID NO: 299 - DNA, 117 bp, Cronobacter muytjensii
atcactatctcactttttgcttaacgcggcgggaaaagacggaaattagcgggacaaaaaagcaagtggacccagcggcgcgaatgtaacaaatggtgcgccgctggcggagaagac

SEQ ID NO: 300 - DNA, 114 bp, Cronobacter muytjensii
ggcgcaggccgaaggcctgaaacaccagctcacgcagcaggcgctggcgacagccacgctccacgctggcgggcaggagatgacctggcggctggataatgacacgctcaccga

SEQ ID NO: 301 - DNA, 101 bp, Cronobacter muytjensii
cataaacgggcgcgccgggattaactcccagtgttccccacctcagcggaaataaaccggaacagggcggtgagtagagaccagagaatacgcgccctctg

SEQ ID NO: 302 - DNA, 117 bp, Cronobacter muytjensii
tgccgtgctctgcgtattttgctgcgtgagcgcggctttttcctgctccagccgggcaatctgtttttgtaacgcaatttcgctcgcggaatggatgtcgcttgtttttttcaactg

SEQ ID NO: 303 - DNA, 167 bp, Cronobacter muytjensii
cgggaggttttgttttttatgggggaggccggaaatggcaagctttggaaagggtgacgtctggcaagggtggggcgcttcgcttacccaccgagccccatcttcaaacggttattcgctgggcggctaagcgcagcgcacccgctgttcggcaaacggcgcgccaa

SEQ ID NO: 304 - DNA, 198 bp, Cronobacter muytjensii
tgtcagtcaggttgtaagcatatgaacgcacgctcagaagggcaactatgagtgaaaacgtcgcgcggtcaatatcattttgatgaatggaaatcgcgtaatcctcttacgggcagcgtgccgcatactcagtgttccccgcgcgagcggggataaaccgcccagccagccgacgccctgtttcacgctcctttcact

SEQ ID NO: 305 - DNA, 106 bp, Cronobacter muytjensii
tcgccgccacctccacaacatgctgcttcttctcttatccagagtatctgtctctactttttcttatccgcgaaacgcaatatccatttccgccacgtagcattat

SEQ ID NO: 306 - DNA, 102 bp, Cronobacter muytjensii
ggccggggtgatgttatcgctgtcatccggcgctatcgcttcagactgacctcattcacgctgcgcggcatctgtcaggccctacaccaggccgcgggcggt

SEQ ID NO: 307 - DNA, 131 bp, Cronobacter muytjensii
ggctccgacgtctgtttcagtgtaaggtgggtgagcgaatgcgcacccacctttttattggcggtgggaacagcggttttcttctcttccccgtgggtcaaggactgagctaagggaaataggcgaggccg

SEQ ID NO: 308 - DNA, 272 bp, Cronobacter muytjensii
gacataactcaatattatcttgagcaaagcaagatgccatgcgggtaaatcgtcaaaataaggcacgattctccctgtaaaaagacctgttttagacggaaaaaacaggcggcgctcttcaataacgagagtttggtgttaaatggcggatttttgacggaaagatggctgcaagatgatagcaatcataaagattgagtcggtgacggcgcttttttgcgggccacggcctgaaaccccgcctggggaataaggcataaactttgcttcct

SEQ ID NO: 309 - DNA, 114 bp, Cronobacter muytjensii
cagcgcttagcacattttcgtcggtatttatgcgcctccggtcttatgaccggaggcgtttttgtttgtgattatctttcatcggcttagcgcggcctgccgtcagcagcagcg

SEQ ID NO: 310 - DNA, 101 bp, Cronobacter muytjensii
ccgggcttcctgcgcgccgttttcttttcttcagtctcgttttcctcttcgataaattccggcaatccaaatacgcaaactggcaaagcgggtcgcttacg

SEQ ID NO: 311 - DNA, 176 bp, Cronobacter muytjensii
gctgggggagtaacgatgtgcgggacggcgggtggcgctttgtttacccgccctgcgaaccggacataacgtgatgcggttgtgctgggggagaaagcgtactgaccttatcaatcaccgcacccaggcgcctgtaaaaaaggcccccctcccccgtttgccccggaccgcccagg

SEQ ID NO: 312 - DNA, 191 bp, Cronobacter muytjensii
cctcgactggcaccccgcgctttatccagtggccacgcagactgcctctcacacggtacgttctgtcagtgcgttttgcgaaaccgactaagggcgcggtacggaataagcccgtttgcttatgcgcgccgcagagcgctggcaaaattttcattcgtcgtcggctcgaagtccgggcgcactcagtttcc

SEQ ID NO: 313 - DNA, 154 bp, Cronobacter muytjensii
gcacacgggatgtgccgggcgagatgctcctgctcccgattgctcaacataccatgattttagtgaaaggacgccggtagcgcaggcgtcctgaaatgtgatgaccgcgcatccccattagccggggcaggcgcgccgtatcgcggaagaagcc

SEQ ID NO: 314 - DNA, 151 bp, Cronobacter muytjensii
tgcctcgatagcgcaggcgcaggcggcttatgacgacaggctcgctgccgatgaggcggtgtaagcgtcttgtttccacaagggccgggcaacacggcggctgaataatgactgcggaggcgttatggatatcacgcgtttttatgcctct

SEQ ID NO: 315 - DNA, 455 bp, Cronobacter muytjensii
gcgaaacgacgttatcgagttgttataaaagaatgatggcggcaataaaaaatgtcacccaggggaaaagtaaccaaatgaaacgggcgaggcggtgagaggcaacgcgcccgcgaagggcggcgcttcagcgtgctgacgggaaagcgtgtttcaggcaggggaattgctcaaaccgggcgaacggtattttacccgcggcgttatcgtacaggtcgacatgaggggcacccggacgatcactcgcgctttggcgcggctgccgaccgccttactggcgtcttcagccaaatccacttcctgataaatcaaccgggcgctcacagcgtcggtgttgatatccggggagacgcgcttgcacgccgcctgatattttagtattttctaaatttagaaaggattctaaatttagaaaacgctaaactattcttaaatgaccgaacgggatctgttac

SEQ ID NO: 316 - DNA, 135 bp, Cronobacter muytjensii
ttttttctaaatttagaaaacgctaaactattcttaaatgaccgaacgggatctgttacaacggcaggcgaatgacgcggccgcactactgaaaacgctgagtcatcctcagcgcttattgattttgtgtatgct

SEQ ID NO: 317 - DNA, 109 bp, Cronobacter muytjensii
cctgacgattttagcgacacggcgctgcgcgagaccgataccgtcatttttcactgccagagcggaatgcgtacggaaaaatttaaagaccggcttatcgctgcggtat

SEQ ID NO: 318 - DNA, 286 bp, Cronobacter muytjensii
gggcaaataatgaaaaagtgagcgcgcgcgccactttctgtcgtgcggcaacgtgagaatgattgcgccagcgccggtaatgcgcgccgtgaggataccgaaacccaaaaacaacgctgacggtatgataaatacaggaaaagaggcgcaatgcctctttgttttttaatgtgtataaacgttggggaagaaagggtgccaaatccttttggcgggtattaaagcgttatgctgtgattaaatcgctatgccaaataaaagaaacagacacgcgataaacgccaca

SEQ ID NO: 319 - DNA, 159 bp, Cronobacter muytjensii
ccggcgtgcttcagaggctgtgtaaagtctttatcgttaattgcgaagcgttataatcaatatggccctcaaggcgaggtgctccgacggcgcagcgtaaaataaaaggcggcttaaccctgtttccaggtggcgcgcatggtaggggattaccggcct

SEQ ID NO: 320 - DNA, 128 bp, Cronobacter muytjensii
gcttttaaaaggcggcttaaccctgtttccaggtggcgcgcatggtaggggattaccggcagcttatcaagcgatggccggtcattccccctgaaaaccactatattttgtagcgatacgaataaagc

SEQ ID NO: 321 - DNA, 100 bp, Cronobacter muytjensii
taccgtttaaaaccggcaatgcatcgccggtttttcagggcaggcggcgccttctttctgataaataccgctaatcagaagggcgcctgtcacgggacgt

SEQ ID NO: 322 - DNA, 179 bp, Cronobacter muytjensii
ccgatttttttgagccggaataccaccgctttaccgcacccgccgtgggtttccatccagggaggtgcgcttcgcttactcaccctgtaacagaaaccggggctgaccgtctggcgggtaagcgttagcggccccgccactcataaccgcccgccatccgtaaccccgtcatccccggg

SEQ ID NO: 323 - DNA, 156 bp, Cronobacter muytjensii
gtacgaagcggggcatattctgaaaaaccgagcggccttcacagaagccgcctggccgcgagcgcaagggcgttttataccgcgtgaaaggcaagtaaaagccatttaatacaatatgttgagcgataaaaagacaacgtgtaaagcgcgcggccc

SEQ ID NO: 324 - DNA, 207 bp, Cronobacter muytjensii
cgcggtgggtgcggcttcgttattcatccctgtttatcgttaaaacgtttactccattgggggccgtcatgacctctctgccgctgcgagcgctccggttcaagggtttcagggggtcatgggtaggaataatactgagccttgcgcgccggttaacatgatcccgctcgttaaagagggtttaacgtcaacgcagggcgggtaaac

SEQ ID NO: 325 - DNA, 258 bp, Cronobacter muytjensii
ataaggcaaagggcaagaaaataaagtatttataaattaatgctttgcataaggcaaccgattaacagcgatgaacgaaaatgcgcagagcatgtacaaaacggaatttgcgttaaggtgtggcgggcatcgcgattattgacaggcgttattccggcgcgtcaaggaataaagaaatcaggggtttttaagtggctctgacagtgtgcaattcgacttcagaggccagaagcgtctgaaaaaaccatgcgtagtaag

SEQ ID NO: 326 - DNA, 1752 bp, Cronobacter muytjensii
ccacacgcctgcccgcggggcgcgtatcgctgacgccccgcgagcgctggctgctgtgttacgatttttattgcccctaagcgcgattttcagcacgttgcgtatcgcttacggcattctgccgtaaacgctgttgtcctgcccgccgtcgattgtgttgacgagcctcgtcgttatactcacccctgattttaatggaaaactcttgagggaacagtgaaacacgcatactggctcgcagccgcgctgctggcgctgaccgcctgcaacaaacaggacacctgggaaaatagcgactatctcatcaaaacgattagcgttgattatgacaataaattccagaacggcaccggagcagaaggacatcctgagtttcaggctgctattacagaagaaatacgcgggcttaaagagaaattctattttcacctgaataaggacacgttgacgtggtatcaggatacgcggccgcatacggagaaaatcgcggatcgtcgggtgcagattaacggtatctggcacacactcacgcgcgatgcgacgagcgatatcgtgcgcgtcgtatcggataacacgggtatgtgcgggttataccgctgtacggtcacgatggagttgacgcctgcaagcgccgagccggcacggctggcgcgcctgaaagcacagtttcagcagaccgaacagcgccgtcttgctcagacgcagcgccagaaggcgcaggcggaagaggcgctacgccatccacccgcagggtttcttgtcagcctgaataacgatgccgaactgacgctgcccgacgcgatgattcaaagcctgcaacgctgggagtctggtatttacagccgtcgtattggcaagctcagcatcgactggcaaaacgaacatgatgaaatctattcgtttactaacccggcgcaaaccctgcacggtgaacttattatcgcaccgggcgcgcaaggcgatattgaattcgaccgctggctggcgttgcaggagagcgtgatttacgcctcgtcgcgcggcgcgatttattataatgcgcagggcttgccggaggcgttttattaccactataacgcggcggcaaaacgctatgtcatcggcatcgctaacagcgagtcttttgcggatatcctgacaacctattcggtgttacgcacgatggacccggaataccgcatgcaaaacgtaattaagatggatgatctggcgctgccagcggcggcgcttgaagagcgaatggggatcaccgccagcgacctgtttgactgcgcccgatcccgcctgctcatcctcgataccataaatacgctgctggcggaggctgagcgtggcgagaaagcgacgcgtaacgtgcaccgcgttcccgctcagctcagcggcggcgggagccatgaggattatgcgaagatggtcattcaccgtggcaccctgcgtgatgtggcggcgaaaacgcagaaggactatccgggcggcaggtggcttaatgaaacttacctgtacccgcaaaatgcgcagtttgacggcgcctacagcttcttgctggaaaaagatggcctggtgtatgagttctacgtggataacagcgagtatacgcaggcggagcggatgctttatctgacggtgctaagaacaatcgacgccgcaggtattcattctctgccggcgagcaagcgcgctaacctgtttgcgccgcagaaaccgtaacagacgcgccggcataccgtgcgggtatgccggcaggggcgtcat

SEQ ID NO: 327 - DNA, 169 bp, Cronobacter muytjensii
atttgctgaatcaatctgttaactccccttaaagattcgcgatgcgaattaatttcttttgttttgataaacgcctttcatcgcatatctccccgctacagagctttccactttattaaaaattgtaatcgctttcattttattgttttgactgcgttttctaagttgt

SEQ ID NO: 328 - DNA, 439 bp, Cronobacter muytjensii
gcttctgagcggctatgtatggtttccgctcgccttaagcaagagaatcgcgcgcataacgctgcgggcatgcgctctgacgacgcgacgcctgtgcaacagtgaggcgcggtttcacaacctacgtcgttaccagatacggctgaatgaagcctccctgaaaaggcgctggcccacccagggcttctttttaacaacgcttgtcgccggatctacggatatgcaacccgggcaacgcatttattattatatgtgcgtaataagttttaaaactgcaattaattagtaaatgaattgtgaaataaaaaggcgttttttgatctaaggaatttttatttttcgccgatattaacaaggaagtgtgattaatatctcgaatcgatcgtgatgaaaataacggggagttattgttcgtatcgctttggtaacccgacaggca

SEQ ID NO: 329 - DNA, 126 bp, Cronobacter muytjensii
ctaaatattcccgactttcctgtaaacgtttagcgtgtacaaaaatctcgtattatttttatacgcaataaaatgttttttaaacagcaagttataagatctgaatattatcctaatcatttttga

SEQ ID NO: 330 - DNA, 202 bp, Cronobacter muytjensii
cgctctggcgcgggcgtgaatgcgtcaacgtggagggtaagcagcggtgcttcgcttacccctgcgatattgaacaaagagcatggcgtttgcagggcgggtaagcgcacccgccatcgtgccccgcgacagccccggtctcacccgccgttgcggcggtaaaaccccacactttctcatcacgcccattcacgccaggggt

SEQ ID NO: 331 - DNA, 129 bp, Cronobacter muytjensii
tcccctcaccccgaccctctcccctgagggagaagagaaaaccctcggcgtaacgttggcgttggtcaggcgggtaagcacagcgcccccgccacacgcgtcttaacccaccgccatcaacgccgctaa

SEQ ID NO: 332 - DNA, 150 bp, Cronobacter muytjensii
attgggaagaggggcgccgcacccgatttaacatccaggggccggtaagcgcagcgccgccgctacggttgcgggagagagggggcgggcgcgtcgcttactcacgctgggcaatcgcccgcaggccgccctacccacggcgacgccaat

SEQ ID NO: 333 - DNA, 190 bp, Cronobacter muytjensii
ctgtaaaatttctttatgaacagggtgttgtctaattttgtaagtatttttataacgtttaaattaacgctgaattaaagcgaaccgcgcatgcggttattttaatagcgaatcaatcgcaacgcagaaatatctgaaactggcgagaggaaaataggctggcacggcataaaccgtgccaggaaatata

SEQ ID NO: 334 - DNA, 145 bp, Cronobacter muytjensii
acctgccagagtacggttgagttggcggaaggtgggggcgcttacgctaacccaccctgcaaaggttaaagcggcaggccgtaaaactcagggcgggtaagcgtcagcgcacccgccgggagagatggcttcaaccgataaccca

SEQ ID NO: 335 - DNA, 213 bp, Cronobacter muytjensii
gaaccgctgtaacggcccacgaaatggcgagcgcccgggatggggggcgctgcgctggcgcaccctgcacgggcaaaccggcagcttttgttaggtgtacgtttgcgcccccgcgcgctcaacctctcgctatttctgaacaccggccgtcccccctccgacgcgggagccttataccagactgccccacaggtcgtactcgtcggcgttttc

SEQ ID NO: 336 - DNA, 994 bp, Cronobacter muytjensii
tgaaacattaccttttttgattgaaaaggttacgctccactggcgtaatgcacttggatttgttatcaccttaatcattctttataactggatcatagtaccagtacttgatgcttgtggtattgtggttatccagataccgttaggtcaactactccaagtactattgattatggttggtggaagctaaaaaagcctctaatgaggcttttactttatgatagctgacaacgaaacttgtgtataattaatttaagaaatattgacttgttattagttattgctgtatttgaataggtcattatatttcctttttagtattgcatcatatatataaccaacagtgtcaattcttccaataatgctattggcaagtgtttttatatcttcgttacttaatttctttgcttggttagcattagaggagaacatagccaattgttctctaatagtattgcattcagattgacatatagtaagatgaaccttggttttttcccagtgatttttacatttaaatataatctcccaatgcgagaagctatgtataagtaatatttgattgcttatgcaaataaaataatcttcttggattttatttatttcttctttaagtgttagagcgtttttttctgttaatttttctgtttttgccacatgttgtagtgcatacttcaaacgagctaatataaccattaattttaaaagttcttcaagtaattcctcggaacgtttaaatgctttttcattaattttagaattaacccattttttaacttgatatgctgagtagatcgccaagagtaaagcacagaccgctacagttgctgataaacctggggcagtaattttctttgggtttttaaataaaagccatgtgataaattcggttagcaacacacctacaattaacgattttatatgtaaaagtttaactcgttccaaatgttctttagcccattttttcattctatctaaatacctttacgtttta

SEQ ID NO: 337 - DNA, 1273 bp, Cronobacter muytjensii
ggttagcgttgatttatcagagagggtaaataaagcagtacgatgacccataacaccattcccactatttttaatggccagggatcaggaaactcgaagcagagaagcgtgcccgtaatcagtagcgggcctgttaagagttcaaaaatactgtttaacatcccaattttttgggaaaggaaccggttcagtatcaacgcgatgagtcgcgctcctgcaagtatgagtgcgactcccacagttttttcctgccaggaggcgagctcagccaatacaattaagcaggtagtgagaacccagcaacaaaaaagaatattaataatctgaatgatggttttattcatattgcctggtctttttgtttgcgctcattaatgattttttaattaaatggtaatggttgtcatatataacgtgtatggatggttcatatatcgattcatgtgaagtaaatgaaataatcttcacgcattttattatgaaatatgattgttgcaaattttattatgtaaatcgccacgttgtctaattctcaagtcattaatattatctgaaaaaacgtttagcttactggcgaaatgatgtccttttggtaatcttcaattactaaataaacagataagaggtgttaaatttatataacgtttgattgtttataacaggctggattaaaacgcgtttctcaataaaagagtactaactcgtgggcagggttcagccaatcatctaacaggtatgtgtttatagagaggcagtatggataccgtagaaagccttaatgggggatatttttacaaaggcctttttgatttgagcgcacatgaattactcttctgggtcatgattgatgaaatccaaaaacagcttggcgtcgaggatatcataggcgctgcattcttgttgttaggtacgaatagtattgaagtgccgggtaaaatgtctaccgctacaaaagggacgtctcacgcttctttattctttaggcagcacctaagctataaatttaaaaggcgtattcttccaacattgaccaacacatctttctccatgcgcgggcttaaaatcttctgggtcaataatttaggcgctttcgtcggccgtgcagtacctgtgctgggctggattatacttgcgaaagatgtttcccttatcagttacaatacggtaaaccattacaataaactggtacgtaaagaggacaggatctggtgaagatggtatctgatgaagacatacgagcaatgatcttaaaagaactaccgctagtgacttc

SEQ ID NO: 338 - DNA, 521 bp, Cronobacter muytjensii
taaacacaactgagtgattaacgtcagaattgattagcatgtgattattaaaacagctgttcctgcaatgcattttgcctcatcaaaatatgccattgtgtttttatacatttaacgtgtcgcagagatattatgtcgccggtttttacaggcgatttggtttattgaagactgataatgagcgtgagaatcacaacacaaaaagtggatacccggaagaagcgcattcagcgtgatggattgaagggatccacatacttttgccaacagggtggaaaagtatgggtttcggcttccggagaccatcagactatctgtcagcggggtttaggcaaagattcaggaacaagttcactggatagttacttgcgttgggatgatatcagtgcgatagcgctggttgatctgctttacgccattgaaacggcataacgtcaggcatgatatcgcattttacagcgctggcgcagctgcataactacctgaatcagggataccttccagaggtgcgttttctgcac

SEQ ID NO: 339 - DNA, 173 bp, Cronobacter muytjensii
aagagccgcaatagcggcgcattcggcaaacatcacgctgctgttaggcggggtaatgaccggttccggctgtcgggcgttagcgggagacagctcgacgatggcgcaggcgccgtgcggggcatggatgtcgcagcggcctggtagggtttcaactcgtgtcgtttgcggct

SEQ ID NO: 340 - DNA, 131 bp, Cronobacter muytjensii
cagagggggcgtttcgctcacccctccagcaaaagaggagtatgttgcttcacgttttacagggcgggtaagcgaagcgtatccgccatcaaacataccgccctccccgcaaggaggagggcggggtgagg

SEQ ID NO: 341 - DNA, 122 bp, Cronobacter muytjensii
gtgagtgaagggccagcaggtgtgcgtacaggcaaaaaggcggggggcgcttcgctgaccagccctaccattattgccagcaagcacagggcgggtaagcgttaacgcacccgccctgtgtc

SEQ ID NO: 342 - DNA, 125 bp, Cronobacter muytjensii
cgcgggcgcgcggattaacgtatcgtgtggcagggaagtgcagggcgggtaaacgcaccgcacctgccgaaagagatgtggcgggcaagcgaagcgcacccgccagctcaacgccctgcaacttg

SEQ ID NO: 343 - DNA, 201 bp, Cronobacter muytjensii
aacaactggccgcctggtatcagcctgtcccggatccacaagagctcgcccgtaaagaagaaccaacgcgcgcgccgcagcctgcgcctgccgttccatcgtcaccggtatctgatagtgcgaacgctgcggcctctggcctgaatgttgcggcacaggcaaccgtcgcctcgactgccgttcacgctgcatccaggacag

SEQ ID NO: 344 - DNA, 249 bp, Cronobacter muytjensii
gagcctgtcgagcccgaaccgcctcgtccggtacagcagcctcaggtgccgcaacacattcagcagccgccgcagcctgtcgcgcctgcgcaaggttatgcgcaacctcagggtcatacgccgcagccgcaaacaccgccggcgcacgcgcctcagcaatacgcaccgcagcctgctgcttatcagccgcagcagccgtcagcgcctgcgcaggattatcagcctcaacaaccggccgcagcgatgcac

SEQ ID NO: 345 - DNA, 167 bp, Cronobacter muytjensii
ttttctcgtttttgtccgtgtacttttttacgtgatttattgataaatattttcatggatgttggcgtgggtttatttaattaactcattattttttatagataatatcttacagtcaacgttaacgccgctgcggataaatcaaggctgttcatcgacagcgcatt

SEQ ID NO: 346 - DNA, 133 bp, Cronobacter muytjensii
aaaatgatgaatttttgtacaagagttaaagagaaaaaactgtaataaaaaatggacaaaacgcgggcaggaagaaaaagggccaggggtctgagggcctataccatataaaacatataaaggaaaggcagtc

SEQ ID NO: 347 - DNA, 156 bp, Cronobacter muytjensii
aggagggtgggcgcgcttcgcttatccgccttagagataaaacgcgtgtattcacagggcgggtgagcgtagcgcacccgccttctttatataaagcttccgcgttctgtaaataaccgtctttctttttcctgagcctgttatcccgctttaacc

SEQ ID NO: 348 - DNA, 259 bp, Cronobacter muytjensii
ctgttcccgaggcgctgcgcgttgagactgaaagccgtctcagtcaactgctttaccggtacgtgttgctcacgcctgatacacctgacaacaccgcgccgtaacgtgcggtatgtctgtgcagggtaagacgcaacagagaaagacacccgtcgcgcactggttaaggttttttgtctgttcagcgcgtaaagacgccgctaaacgacgcagtgacggcttaaaagcgaattgatcccgaagcggcgctactctcggc

SEQ ID NO: 349 - DNA, 2306 bp, Cronobacter muytjensii
gatttcaaggtccaatgcgtttacatggctggcatgtaataaaataaccagagtggtaatcggaactaacgtgcctatacctctgcgtattattcctaaaatcattctatgaacgtccttattatcggtaagcattcgcaagaaatcataatgagtacggcttattatgtttgtgataaaaatcacaggtgaaaataagggagtgtttataaagggggaagtgtcagaaagtgttggttttaaactgatatcttattgaaaaggttacgggtttgtttttcattatttagtcactttcatggctgttttgctgggcggtaatgcattttcttattttctgggatttgttgtttttgcggtgagagtaacggttccagttacaagaatgaataaaaattttcttcatcgatagcaccttgattgagcatatacccataaatcaataagttttcataatatttattgtatgcccgatgagtgatattgaatatgagagctgtcatgcccgttataacgatgggtgagctgcgttagttttatgatgagctttattatcaataaggagtttgctatggctggtaacttaaaccttctgccccttcctcgtccgcctgtcaatcaaggaattgataccgcaaatgcgactgtattaaatcataatagtatttattcaacgttgatgactcagatcacgtcagaaaacactcaaagaaatgccgttcttacactaaacccttatggcaccgcgccactgagtctttatgtcggtatatgggctaatgaggctgattcggtgcaaattacggtaaccgatgaaagtggtagcgttcctttactcacttttcatcagaatatcgttactggtccaaatctggttccagtttcaggtcttgttgcagataaagtaaacatcattagcttaacgtcgacgtctggtaccacaagctggtcaatacttacagcacccctcccacctactgatgctcagaaccctgacgggcataaccttttccctcaagtgactcaaaaaacgccggtgaccgatccttctctccttgctgatggcgtttattttgtatcatgcttcgatcgcaataatattgcgcttgattaccaggccaatattcgatggtttactaccaaggatatagcatcaaataatttactacgtatcgcaaatggtaattttttgtcgtcggcaatcgcgcagaataactatttagagatgtatgagtttgatatggttgggcgagtccataccgtctataaactggataatgctttgcatcattcgttatatcagcaaagtaacggggtgctggtaggggcatctgagtatgcgcccggcactcgaccagatggcggaaaaagcatagaggatggtgtttctgttatcgacctttcaacaggcttagagattcgctattacgatatggtgaaagtcctcgaccctggtcgtattacacgcccctccaatcccccctctaccgacggtactatagactggcttcatgtaaatcaagcctatatcaatgaaaccaataatattcttgttacctccgggcgcaatcaaagtgctatatttggtattaatgcagatactgcggaacttgtgttcattatgggggctcatgaagactggtcctcagcatttacaaactacttgctgacgccggtagatagtcaaaataacccactctatgatttcagtgacccgcagcaagtggctgccgctaatttatctttctggaactgggggcaacataatgttctcgaaatccctaatagtcatactggcctgattgatatttcagttttcaacaacggtaaggcaagtgcgagtaccgacgataagagccttgagccctggaaaaaccagagccgcgtaagtaattatcgtatcgacattaacgcccggacggtgcaaaagctgagcgaatattattccgggcctgaaggttatagtagttatgcggagcgaagcagattatgccgaacggtaatctggtggtttgttatggcggagccactttcgatggcaccggccttgccatgacatgcgatcctggctatagcgacgtggattacggtgtctgggatgacagcgccgaaggaaaactaccgctcagggagctcgacgaacaaggcaatattctgcttgatatcactattggctcagggttagcacgaagtaaaaatgatgatccggccatgtttcggtacaacatcacttgtttcagagcttacaagttaccgctatttggctaagcgaaatataccgctgcgtttgccgcagcggtgacagc

SEQ ID NO: 350 - DNA, 144 bp, Cronobacter muytjensii
cgcctacaagagcatcccgattgcgatggagcgcgtcgccgcgccggtcgaaacatccggtgcgcgccgatagacgggggcgtaaaagcgttccatccatttttccctaaacccgtgaagcggtgcgtgcctgccgttcggaat

SEQ ID NO: 351 - DNA, 143 bp, Cronobacter muytjensii
gtatatattaattgaatgatttgatgtaacgctaaccgatagaaatctgctgcttagttagtgaatttaaataaaaattcagactgctaattgtcagtttatttaactgaggctaagatgcgttggctttaatctgtaagcga

SEQ ID NO: 352 - DNA, 309 bp, Cronobacter muytjensii
tgagaactacgaaagtattgttgacgaaggcggcgtcgcgtacctgaccggcgtgaaagaaaatggcagtgcgcaggtgaggtggggaagccgcgccgaccagcgctgccgtgcttctgtgattttacccgaggcgccgccaggacagggcgatctcctccccctgacggctatgtgtcgataaaaagagaatacgatgatgtctaaagcgttcttaaggggcctgctgttctgctgtcttgccgctgtcccgtccacacgggcggcaacgggattttgcaacacgacgggcggcccgaaaattttttt

SEQ ID NO: 353 - DNA, 116 bp, Cronobacter muytjensii
tctaaggtgtatgtacagggcaccattaccgtgccgcaaagctgtgagattaattccggcgaaatcatcaccgttgattttggcacgctgttagccagtacttttacgacccgggg

SEQ ID NO: 354 - DNA, 267 bp, Cronobacter muytjensii
gctaaaacattcgcaaagaaaattcgttaattgattgttaaaatcgctacaggcggcgggaatatcctatatcattttgagtataaacgcctggcgacgaggcggtgagattgtttagccaccaaatagtttagtgatttatcagcttttgtcagtctggcgtcaataaatttgattgtcgatacgaaagcgaaaaccgggcgctgtcacggcccggcttgcggtcagttatgcagaagcggtaaaacgcgccagggagaaaggaga

SEQ ID NO: 355 - DNA, 126 bp, Cronobacter muytjensii
ttaacgctgcttggcttccgcgttcgcgattttgcgcgccgcacggcctgagcccgctacacgccaacgcgccgcggcttttttcaggcggcatagtgcagacgtgcgaaaaccttccgggggggg

SEQ ID NO: 356 - DNA, 116 bp, Cronobacter muytjensii
gcgctgtcatcggtcgcggctggcgcctcgacgttcgccggccgcgccaggggagccgcctcttcacgcgcttcggcgacaggcgcctgggcgtcagtctgttcgatagcctcaga

SEQ ID NO: 357 - DNA, 126 bp, Cronobacter muytjensii
aggggctggatcgcgcggctacggtatcgccggatgcggcgcgccgacgcgtatcgtatcgcgcgcggcgtatcccgcgttttacgacgactggcgcgcgcgaggcatccgtcttgccctcagtcc

SEQ ID NO: 358 - DNA, 101 bp, Cronobacter muytjensii
cggcgcagaaaggctttcagcgaaacggcgattattcatagaatttatgggaaaagcgggagtggcggatgccgctcccggaaggctgggatactattgca

SEQ ID NO: 359 - DNA, 114 bp, Cronobacter muytjensii
ccgacacacagcaaaaggccctgtccagcgacagggccttttttcgttcagggctcagatggcgttagaggtgggttcagaagcgtgcgcggtgacgttgaccggcacgccagc

SEQ ID NO: 360 - DNA, 122 bp, Cronobacter muytjensii
ccgggtcgaaccgtgacatcaaaaaggcgggtgcgctaacgcttacccgccttacagattaagccatcattttgtggttatgtctcagcgcgggtcactaaagcgcacccgccgtcccatac

SEQ ID NO: 361 - DNA, 3218 bp, Cronobacter muytjensii
agcatgaaaatgattgctggccttcagcagtacattacagctcagtgtttgaattgatctgaaaatacgaacaataccttgaatagcatcaaataaagggctaattagccgacgcctttattttcccatatcaaatagattaccccgcacctaaatggggagtcttttgtatgcatgtcccaatccttccgtatctggattgatcctccgcagttccgtcttaataaggaatgctatatgacttctgaaaatgtacaggcaatggcaacaggcccctcgaatacgggttatagttctgcagaaacacttgatgaaatgcgaaaaatgacgccgcagcctggctcaatcgtattctgtaatggtagtttgtttcaatttgatcctaatgataaagagtctctggatgatgatgttattaccgttgtgaccaaaacgggacagcgaatgaaacgccagtatgatggtatcgttcaggcttcatggttcggtgtggttgctgacggtaaaaaggactgtcgtaaagagataattaatgcatggcagtatgggttgtccaccggtaggactatcaaaatgccggcagggaaagtgaatatcggtaacgaagctagctccattaaaatcgggaatgacactgtggaagcgcgtattcctctggtggcgaaacccggcgatcctggctgcgttattgatgcctatggctgcacgctggtgccggaagatatgccacctgtatatgatggtttggatccggcttgtgtcaaaatcactcttaatatccaacttaaagatggtgagacctatcctgcaggtacagtttttagctttattgtggcagggaagacagttaaatatactaccaaggcaggcgataaggccgcgcaggctgtacaagggctggtggctgcattcaataagattccggagttgtcattgtgggtggccaggtcagaaggggaggaaacacctgtcctgaaatatgggcgtaccaaagcgacaaatgattttccttctttgggtgcagtggaaaatgttactgccaaagcaatcagcggctggtatgacgagagtaaacattttcttttttacggctctggttcaggcctggtcgcaaaaaatgccgatgataagcgctctgaaggggtattcagcccgacggcaacaaattgcccgtttcctccttttactatcaaagggcttggatacgattacagcaagcagtcttatcagggagggaccgcagccaatccgggggtaaatcatgccaaaccttggggtaatggcgcccggcttatggacgtgcagtacgccatccattttcagcttattgactgcgagttcagaaataactatgggaacggcatccgtcttttgaagtgctatcgtccgcgtattcaaaactgtgttggcgaaaacatcagtgctaaccaggtggtggcatcagcgactggcgctgaaaatgaggatcataccggcgggtttattttcgcaagctcctgttacggctcggttatcgacggaacgacaatactgaatacgcgccgctttgaagccgattacgtaacaccgaaaaaaacacagaccaaaggcggcatctgcggctatatcggcatctggcatgagtacccgattgactatgaaacggagtggtcaaataaaactaacgccttcgcaaaatatgttccgcacgttttatttaatctgcattcaacaaatgacctgctccagaccaccgatcgcgtcgcttccgggcatgccatcactaactgccaggtggaaggttacacgcttggcgttaaggcggaaaacattgtagaaacgacgctttataatgttcaggtgcgtgactgctatattccgttccaggcatccaacagccgcatgcgtcttcacggttgtactgcgacttttggtatctgcgacccggatgccgggttgatgcacaacccgcagcttggttttgcctcaatcactgccattttaagtgcgaaagatttcgatccacgagttgagttcattaagagtgaacagctaggttatgcgggcgcatctgcggataaagccgggatttctgcgcatggatgtacttttacagccagagggggggcactggtatccgccgctactacgggcgtaaccgtcgattcatgtgtgctggtggtcgatggtacagctaatattttcaatcaggaaggacccaaccggaaatgcgctggcttaagttttaccaataacacggttattctgaccaaagccagtgaatccaaaggaatggttattcgggggcaggattcagcccgaatctgtaacaatactttcctgaacctgaataaagaaaaagtattcagggtcgagtttggtaacagccagcttaatggagagggcaacgtggccctcgacggacgcggttacttccttttctcaggcaaccgactttatggtgcggtttcgctgcgttcacgcagtgcctatgccctggtgcattcgcgggataacactttccatgcatggccaaaaaacgctgcgggcgcttatccgaatgagaactaccagaacccgatctgcctgtcgacaggctcggaaaattcctttattcagggtttcgtcagcgacggtgacactctgcttctgaaggcagattttacggcgccagtgattctggacgagggtaacaacacgcaacttcgcaacctgacgatccgcttcgttgattatgacgataaagaagttcctctgacttctaatctggccacagcgctgattaatacgctgggcggcggtgaactggcgctggataatgtgcaggtgatcggcaacatgtctcgcaagattgcgctgatacagggaagtgaagccgccgggaaaaaagcctgggggctgaatattcgcaatgtgcgtgacgacagtgacaatgcggcgttaatcctttccggcacggaggtagaggggccgttacgactggaggggccaaaccgatacggtaaaggtaaaaaactgtttggcagcgcagcgaaggaaatgaacctgagcgctaacctcagtaaaaaataccagccctatattggtgagcggctcacttatcacacggaacttgtaccaacaaatcctcagggtgctatctggaacggaaccaagtgggttacatacagattcaatgcctgacgtttcattagttacagccgttggaaatagcggccattcatcaaaccgccctcggg

SEQ ID NO: 362 - DNA, 151 bp, Cronobacter muytjensii
gctctgtactgaatgccactcaggtaagtcggcacgcgaagcgaaagccggtcagcctgatgaagaagccatgaagcatgccgtgcctgatggcagtcaggagacgggcttcgtgcctcactgacgacagccaaccccgggggggatgttc

SEQ ID NO: 363 - DNA, 275 bp, Cronobacter muytjensii
tccgagcagacgaaggcgatgcaggagcagaccgtcgcactgaatcgcctggtggactcaaatgaagcgctggtagcgttgctttatcagtcactggctgaggacatcgaaacgacaacgcttgatttccctgtaccgacctacctaagcggcaaactccgggggtgagcatgcaggccggaaagctgaacaaacgtatattgctacaaaagcctgtaaaaacacaaaacccaacctccggcgcgatcgaaagtggctgggcggatgtggttcaa

SEQ ID NO: 364 - DNA, 930 bp, Cronobacter muytjensii
agcttattgttgatctgggcgactatatgctgaggcatgtcgcccgcgttcagttcaataaggtgggaggggctgtgacacaggtaaacattcctgttgcaggggtaacagccgcaggttcgttcgctgtgtttaccgcgccatatggtgacagacagtcgatcgtttcctgctacgacggtggggtaacgcttaattttgcgcttggtttttcgccggaaagcggtcctgtcgatatttacagctttatatgagctttttatgagcggatttgaaataagaaataatgagggcgccattacggtaaacagtgatttcacctcgccgcgactgcagcgccgaatcacatcgccccgctgggatattggctatttcgacatggatattccgggcataggaaatcttaacgtgttaagggatgcttatgaaacagtcggaaataccttcgttgaatggcatcagccagggcaaatagtctggtgtcgtttcgcggtgggggggtggggaatgcctggcatccactcatacacgccgggaaaagtcgatctggcttttacacgtcttgatgttgctgttcagagcggatatctcgatgtttttaacagttccggaagcctgatatggtctgcaatatctgcgcagagcacgccacgaatcacaggtttcattgaagttccggcaggttatgacctgcaaaacaacaccctttcagtccccgttaccggtacgccttttctgccgacagatatgtttccggggatgctgtctgaggatcaagagggtgtaggcggaaagcttggtatcgccataaagcaatactccggttacttctcgctgagatatatcaaccagaacacaccgaattaccggacgcttcccctgttttcgcgcggcttcaggataccctacgccacattcccgacactctga

SEQ ID NO: 365 - DNA, 151 bp, Cronobacter muytjensii
acgcagatccccccgtaaacagtccccggatcgggatacactctgctctgcctgttttatcgcctcaagcgcgatgatggcctctttatagaagactgctcccggttctgtcagcgccaggcttcgggtggttcgcaggagcaggcgtgtg

SEQ ID NO: 366 - DNA, 916 bp, Cronobacter muytjensii
gtcagcgggaacgatttttttcgcctggcgcatccagtttaaaaaccatcttcctaaaaagatgaatataaccggtaataataagacggttgaaaaccccaaaacatccttcatgttttactctctttcggcccttttccccatcatgttaatgagtaaaagggcatgcacagggtgcagttcgtgcgtagcatacctttggcagcaatacgcggcctgccatccgaatggcgctacctcaacgggcggaacccgtgaagagcagaccccccatcgcctctgaataacagaccagacgcgttagcgagtttgtcgtcaggactgcctttgttgcacagcgccatccgcgccgttcgtcaccaggcgaatggcttcaacgtatatctgtcttgttccatccacagtctgttcttcagaatccctgagctgtgccagtatattatctgtctttacaggtattcctgacactatcaaacgtgacaccgcttttcctatcactctgtaaatagcgtccatgttttcggggtttacgatgcccattcagaactctcctgctaattggatccgctgctattgcctgtacggttggcttgagaaccgtctcaactgagcagaatcataccgggcactacggcaaaaggtaacaggtttttgtggacgcttaatcgggcagcatcgactgacaggcgcttatgataaccctgaggcttttctgcacgtgtagggcttaaatgaaattataagaggataagcgcaggggcacgatgaaaccgcgcaagaggagggacagccatgaaaaagagacaacctttaattaattcagtgatacggaggttttgaaacgaattaaaagcacctgcactggccggtgcttttaaccggctgcgggaacgcagatacaacattaattttgact

SEQ ID NO: 367 - DNA, 183 bp, Cronobacter muytjensii
cattttatttggcacatgcgcgttttttatgcagcgcttacattacgacgttacgcttacggggcgagggttctgttattggcaggcataagcgcgatgaccattctggtagcttaattcgtctttgttgatgcggtaatctgggataaaacgcgaataagaaaaggaataaagggatgagcc

SEQ ID NO: 368 - DNA, 213 bp, Cronobacter muytjensii
atgcgcgacgcacgcatcacgccgcgtttggacaattttacaacgcctgaccgcatgttggaaaaagccaggtaaaatagcgaagccataagaaaatatattctcttgtcaaaaatgtctctgggccgctgtgtttaaatgtgtacggataatttatttatgcgccgcgctggcaattcgctcaataatgaactagcaaaaatagttgtcgct

SEQ ID NO: 369 - DNA, 142 bp, Cronobacter muytjensii
ggcttttcaggcgctaaagtcaccggttactctgacggtgcaagcagtgccaggggcggcaatattcatgtgacgctatgataaagccctggacgtgcgtcgtcatggacgcagagcctgcaagaagtgcgggaaagagttt

SEQ ID NO: 370 - DNA, 305 bp, Cronobacter muytjensii
tacggcgaaacggctttctaaacggcacctcaatgcgacgtcatcaggcaaattccagggaggggaggcgcacagaaggaaaaacaccccgccgatgcgaaggagagcggaaagtacgacgatgcgtcgcgatacaggcagggcaattgccggtagtgcgctcagcgagccgtgagccgctcctgctgcggggtaaagatgaggcaaaaatggcagttcttcggataatcacgagaacgacggcagcttaacaaacaagcgtggcgggataatgaagaaaataaggcgatttgtacgggcacctg

SEQ ID NO: 371 - DNA, 136 bp, Cronobacter muytjensii
acgcagataatgctaaaggctggccgacccagccttttttattcctcgctttctttctcgttttttagcaatgcgtgtctttacatcctcgcgcacctttttcagcaatcgcttttcattcagcgcgttacgtgtc

SEQ ID NO: 372 - DNA, 122 bp, Cronobacter muytjensii
gcggtagccggatgcatgtccaccagcacgttcgccgctaaaaaatccgctgaacctcttgcggcatatcctgcggcggaaaagggcatggttcgtcaggtgatcacattgcctgcgcggtc

SEQ ID NO: 373 - DNA, 207 bp, Cronobacter muytjensii
gcggggttaattgttctctccacaacgctcggctgacattatcagaacgcgccattgagcatatccccgtgatgtggcccgttatccgcagaggcacttccttctggcgctgggcaggctgacgcagatgtatcgtccgccatgaaagcctggcgcgccaacagggttatgggtattgattaacgaggcggttgtttcatggaaacc

SEQ ID NO: 374 - DNA, 186 bp, Cronobacter muytjensii
cccccggcgcgataatcgccactcatgaaatgcgcagaaaatttggcgcgtcagtgaccaccgcgactatcgcgccgattttgttcgtgcacggttaacccacctccactttcccattagcaaaatgtcccgttttcacgcgtaaaaattaccggcttgtgagtgtcagccgtaaatattaatgtc

SEQ ID NO: 375 - DNA, 205 bp, Cronobacter muytjensii
actgactacctgacccggcgctcgccgggttttctttctccttatgaccagtcataaccgccctttacgcaaaccgcctcttcacaggggcactattatataaataggtataaacgatacatcttttgttgcggcgctatcgtcacgtgttaatttctgcgtttcgcttaataagacattgataaaaaacatttttcaggcgtca

SEQ ID NO: 376 - DNA, 236 bp, Cronobacter muytjensii
tccgcttttattgtacaggttacttgtgaagcttgtcgcaataatccaggcaatcgtccagattatattcacccggccaaaacgtttcggaatatcaattaaagtttatttgtgagtccgggaatagcgttatttatcggcgaaattaactccgcagcgtttaatttttattcgctaataaaattggatatcagaaaatccctactaatatttgtctgaagcgtgacggaaagcct

SEQ ID NO: 377 - DNA, 472 bp, Cronobacter muytjensii
atacgcgcctgctcggcggcagccagaacatcggcaacggcggctacgctcagggaacgcgtctggaaggcggcgtgcagaacatcaacgcgggcggcagcgcggtgaaaaccaccgttaacagcggcggcatccagaatgtggagagcggcggtaaatcgttcgaaaacgcggtgctgaacggcggcgtgcagaatatcgcctccggcggttatgacaccaacggcacggtggcgtttggcggcctgcagaatatcagcgcgggcggcgtcacggacttcactatcgttgaaggcaagcagatcctgagcggtcgttctgtcgtcaccattttgcaaaacggcggctaccagcgcgtgaatcagggcgccacagctgacgtcaccatgatcaatgataacggcgttcaggatgtttacggcaccacgaccggcaccgaaatctatgacaatggtgagcagcgtgtttacca

SEQ ID NO: 378 - DNA, 122 bp, Cronobacter muytjensii
cgcgccgtctgaggagagcctggcgcaggcgtctggtgtgaggctcgcgctgtgggtcgctgccgccgcgtcgctgctcgcgctcggcgtcagcctcagccggctgcgacgcggctgacccg

SEQ ID NO: 379 - DNA, 165 bp, Cronobacter muytjensii
ttgttataaaatcggctacataatatatacacgataaccgttcccggtgcccgggcctgcaccgttaaaaacagcgggctaaatcgcataattaacattaaatggcgctgtgggacgcaagcgcagacacattcaaaataattatcccggcgaggagagacaggt

SEQ ID NO: 380 - DNA, 178 bp, Cronobacter muytjensii
ccgggcgagtaacaaacctggcggcgcgtcaatcattcagccttcgggatagtcaatgcggtagccgtcgtctgactcacgcacccaggcaaagccctggcggccaagatgcatacccgccaccagtaattgctcgcgggcggcctgcgccagaaggcgcttgcgggtggcggcggcc

SEQ ID NO: 381 - DNA, 180 bp, Cronobacter muytjensii
tccttttgaatcaatgcgaaacccggtatggcccggcgtgtgtcctggcagccagaccgggcggatcccgtcggtgatggcggtatcaccggagataaaacgcagacgcggcgcataaccatccagcgtgcggcgggcgagcagaatagcgcgctgtactcgttcgcttgcgccctcaag

SEQ ID NO: 382 - DNA, 340 bp, Cronobacter muytjensii
ccccggcggtgcgctgaagcgcatcggccacggcagtggggatggctgttaacagatcgagactggcggccatgttgccgtcgctgagcgcggtgacctggaaatcgccaacctggcgtgaaggaaaagcgggatggtccataaagccctcctggaggtggtgcatattgacatttcgtcatgctaaaggctgccatcgccccggcaaagcgatactatgacacgccttaatgagcttttgtcactgacgggcgcaagcccgcccgcaggaggcgccacgatgcgcagaaaaatccgcgcaggagctttcgctgacggaaggcgccatcagccgccaggc

SEQ ID NO: 383 - DNA, 209 bp, Cronobacter muytjensii
tgaaatggtgggcgcatggcttggagacattggcgaacctgaccctgagcgccgggtcgcggtgtcggcgcaggaagtgattgcggcggcgcgtcgccacgggctggcaggcgaatagcgggacgcttatcgtcccgcacaatagattagcgtgttcacgtcggcttctgctcatggtgtagccgacgcgcccggcagatgtgagcatg

SEQ ID NO: 384 - DNA, 275 bp, Cronobacter muytjensii
gcgcaccaaagaaggagagaaaagatgaaaaaagcgatcgcgggcgttttgatggcggcgagcctgcttattgcgaatgatgccctggcgcacgcgcctgcgcgtcagggcgcggtcgaagaggccaatcgtcagttggtgcttgatttctacgaccggttctttaatcgccatgaaaccgcagcggcggatgtggtggtggatgattaccgccagcacaatccggaggtgccggacggcaaagcgccgttcgttaactatttcagcgggtactt

SEQ ID NO: 385 - DNA, 112 bp, Cronobacter muytjensii
accatgtacaataaaaaagcggccttcggggccgcttttttttatgtgtatgaagcttattcgccgtcggcaggcggcatgttatcagcgtccgccacgggcagcggccagc

SEQ ID NO: 386 - DNA, 177 bp, Cronobacter muytjensii
tttaggatgcgaaagagtaacgtgcttcgacggagctggcaatatcctgacgcgcgctggtcgccccctttttacgacaatatgtaaacctggctgaccacgccgcaccgggcttcaggtttaatggggggtcaggaagaccccagccatttccaggggttttcactcatcctccgg

SEQ ID NO: 387 - DNA, 138 bp, Cronobacter muytjensii
gtgattccgccccggccttgctgccggggcgttgtgtatcttgccgccgctaaacttccttcaacggcacctcactcacacgcaaggttttccccgcatgactcgcaaggcctggcgttttgttgcaaagtaaaccta

SEQ ID NO: 388 - DNA, 108 bp, Cronobacter muytjensii
gccttgccgggtgggcggctgcgctcacccggcctggctaaatatagcgcggcatcacctacaggcaggtaagctgaagccgccacctgacacccaagcatcaaaatc

SEQ ID NO: 389 - DNA, 117 bp, Cronobacter muytjensii
cgtcaccgaaacggcagggcttaatgcgctctttggcggtggcgaagaggccgagcgcgtgaaaaaggattttctcacgcagatcccgctcgggcgcgttggcctgccggctgagat

SEQ ID NO: 390 - DNA, 136 bp, Cronobacter muytjensii
tctcctgagcggaaacgaaataatgtgatcccgctatcctggcgataaccgcgttgttgatgatttagccgccctcgtcatcgcgaggataacccgcaggcagcgccgctgcgcctgatgaaaatattccccctct

SEQ ID NO: 391 - DNA, 251 bp, Cronobacter muytjensii
cgacgaggcatggaaactattccggaaggtgattatattttcgcaaaatagtctcatatattgcggtggggatatttatttaccgctttgcttacaggcttaataacagtgtggttatagtggtaagcgccccaacatatatttcaaaggctctaagattatccttagggtgacgcggagatacaagcggcaataacaggcgggcattcataagaaaaggcaatcgccgggcaggggccacccggcgatga

SEQ ID NO: 392 - DNA, 152 bp, Cronobacter muytjensii
gagaataccgacagcaaaaaaacgccgcaatgcctggccgcgaaaaaagacgttggttgaggctgcgttgagaaaacaggaaaaaacagggccagcatgagattacggcgttttcagcccggccgcgctcatcagcagacgcagcaccatac

SEQ ID NO: 393 - DNA, 183 bp, Cronobacter muytjensii
cgtaagtattgcggttggcgacaccgggccggttagccgtcaggcgatttatcacgcgcgctgtgagcgctgcggcgagccctggcgcgcctggcggcaagacgaaacgcgctgtccactctgtcgacatcaccgctttggcatgcgcggcggctgacgctgtgacctgctgaatccacacag

SEQ ID NO: 394 - DNA, 107 bp, Cronobacter muytjensii
aaactacgcgggcgggcagcacgagcgggaggcggtacgcgggatgctggggcttgatccggcccccgggggcccccgggggggggcccggctctgatgtctgtgag

SEQ ID NO: 395 - DNA, 365 bp, Cronobacter muytjensii
acttgctccctctacgccatacaacgtgccgtatgggtttctggcgcagcagtgctggtttacaagcgacagggggtttggcaagccgctatacgcgaagcttggccgggcatgggatcacggcgcgcgcgagaccgggtatcagccaggacgcaccgccaatggtcaggcgctgatacgggattccgttacagatgcaggttttgattcggccgcgccatggggtgcggcggcgacaaccgggcggccctttgcgcccagccgaagcggggcgcgtaacgacccacgcggtaatcgcctggtggaataccagaaccggcaggagagcagggaagaaccgcgataaaaacgccggcgcgggtgcg

SEQ ID NO: 396 - DNA, 111 bp, Cronobacter muytjensii
tagcgccgccatcaaacagatggtcttgctcaccaaagcgcagaatgacgcgctgacgtcgggttcttcgacgctcgccattctcctgggcgcgctggcgatagtgacagg

SEQ ID NO: 397 - DNA, 248 bp, Cronobacter muytjensii
tgatgtaatgccgggccggtttatcaccggctcgggcaggtctgttattgtcatgattaaggaaactgatagtagtcgaaacctgacggcagcaacacccggcgcgttctgtcgggcgcgtaagcggcaaaaaatgctaaaaattacgtgacactgtcactaaaaaagcccaggcagcgaccgttgcggtaagaaaagggtaaacggcgcgcgcggttttaggcattatcaacccacgcttactccac

SEQ ID NO: 398 - DNA, 108 bp, Cronobacter muytjensii
tcgaaatgcgcgtaactgactgttttcacgcaaataaaaagtaatttttttttttgggggaacccaaacttttcattttgcttatcaaaaggttagtcatttatcatc

SEQ ID NO: 399 - DNA, 157 bp, Cronobacter muytjensii
aaccacacgcagtgcgggtaaccctgtcacgtttaaggatcgtttttgattaaaaggatcgtgtaagcgatcctggccggcatgacgttgcgtttaatttgtgttgcccgtacaccgggcggaggaaggcaatgaaggtttcgcgtgaataccttac

SEQ ID NO: 400 - DNA, 139 bp, Cronobacter muytjensii
tgttgctgactatagctgacacgcaggatgcaggtgtcggggcgggtaaatggcctgtaaaaaagcgcaaagagggaaagtctgtggcgactcgcgccaccagagcgataaaacgccagggcgaaccctggcggtgagc

SEQ ID NO: 401 - DNA, 169 bp, Cronobacter muytjensii
cgcattacggttgtgatatttcacttaagattaaataagccggggaatatatttccccggtgagtgagataaatccaaaatgaattaatcgcccgcgttacgggtttcattattttccggcaacgggattattcccacttaacgactttccggttgccgataatatgac

SEQ ID NO: 402 - DNA, 328 bp, Cronobacter muytjensii
cccaggccgcgccaaatgggattattcccacttaacgactttccggttgccgataatatgaccgcatcatcatcacccgatatcgattatttcacgcctgccggctatgtaatttcgcgcctgcgaaatataacgcgtgttgtcgtgccattacggggatatagccatgcgattcaccgggttttgtaatgcggacattctgatggcaacctttaaggggagtacgcatggttaaccgaattcgcgtttcctcaccatccgcgcccgactcgctgttattctgggcgctgaggggcgaagaaagcctcggcgcgccctttcgctttac

SEQ ID NO: 403 - DNA, 134 bp, Cronobacter muytjensii
gcgcaggccgtggcgcactaccaacaggcgcagtcggtggcggcgtgcgttgccgatgtgccggtgcgcggccagctcgcggtgcagggcgcctttggcgaggcgggcgcctggtttgccgataaaaattacac

SEQ ID NO: 404 - DNA, 428 bp, Cronobacter muytjensii
tcaactctacccgatgagcccggtgtttatatcatccatgcaggcggaaagtcatatgtagggtcggcaggtattaagcaacaggggatgctttctcgcgtatcgagcccggaacatgccaaggcgcaaagattgctttctcaaccagatgtcaaggttcaatacattcgtgttcaccttgatgattcgcttacagaaagcgaaagaaataatattctgcgctattttgaacagcgtgagttcgataaggaagtaaaaactgtaggtataaataacatgcttaatgataagggttcgaggatacaggctaagcgaaaaagatcttacgcattgtcgttaatttctgaaaataaaattcgttcatcaagtagacgaacaacttgtaaaaaaagttagtacgagggagtaaaatgcaacagactaaactt

SEQ ID NO: 405 - DNA, 236 bp, Cronobacter muytjensii
gccagactgcgatttttctgaatagagtattcaaatgtgaccgcttaaatgtcagttgcgaggataaacaaatatttttcgtggggaaaataacgcattgtgattacatttatttgtgattagcttttgcgcgccatttatttaactccagcaactatgaggttattttgacgcgccggtgtcgttattctggcgcagcgctgccagcaggcgcgctttacgctgctcgagctcga

SEQ ID NO: 406 - DNA, 405 bp, Cronobacter muytjensii
cattacgttaacgcgatgcaggggttacgcatcaggcatgcagggcaggtcagaatggggacaggcgaacagcgtcggatggccgggttccggattaaaatgtaatttaacataatatacattatgcgcaccagggtgattcgtggctgaatccagcgtttatcggtcgtcatcccctggtcgctgacagcgtctctgcgctcattgctttcgttcggacacctttatctgaaatggtgttctctcgtttgcctgttcctgcgtttaccgcccaggtcgcgagcgcgctctcgtttgctgaacgatagctcttatgctgctgactgaatccataaccgaccttttggctttgtgtgaacagaattattatcagtcatacaaccaccgcccagccctggcagactc

SEQ ID NO: 407 - DNA, 290 bp, Cronobacter muytjensii
tcttacgagcgtataaacccgcgcttcaaggctgtcgcttgtcatcagatcctccgcgcttaacgcttatcactgcgccagcgcctgccgctcatgcgttgcaataaattcgtttttcagcgcgctgtagagaacagactgatacccgctgtcgcgggcggcggccagtttcagcgcttcatattcccgcgcgattccctcatgggcgcgcagataatcgcgaaacgccaggtggcgcgtatacctgcatggtatcagcgcatgcatcgagcgcggcgatatcagccacc

SEQ ID NO: 408 - DNA, 177 bp, Cronobacter muytjensii
cagtttgcttctttactgaaacgatccggccaggccgggttatacgactcaagcgtgattaatcgtgcggccattgttatctcctgcataaactcagccaggcgcaagcgtttccataactatctgcgcgcccggcatcatcgcggttaacccgtcgataagctcccgggctgcggc

SEQ ID NO: 409 - DNA, 114 bp, Cronobacter muytjensii
cgtgttgaacgtggcggcaggccgcctccagcgcccttctccctgcatcactgtcaaccagcggtgcggcaatcacgtgaatactgatggccctgaagccgggtgcaagctgca

SEQ ID NO: 410 - DNA, 140 bp, Cronobacter muytjensii
ctcctgctggaaatttactgacgcgttggttgaggtgatgggtattattacaaaaactaagaatgttgtaactaaagagttatgcctaaaacagatgtgccataaaaaaacccgggcagggtggggtgggggttttggaa

SEQ ID NO: 411 - DNA, 103 bp, Cronobacter muytjensii
cggttaattctgcccggcgtcttgcgccaccccgtcatcaaaaggctatggctatcgtactgatagccaccatttagcctttgatttttaaaggttttcccgc

SEQ ID NO: 412 - DNA, 124 bp, Cronobacter muytjensii
tggatagcgttgatggcggtgcgcaggcttaccccctgcaacaacacgttttgtagatgcagggcgggtaagcgaagcgcccccgccgcgtcaatccacgccacctcatccggcaccccatgag

SEQ ID NO: 413 - DNA, 161 bp, Cronobacter muytjensii
ccgtccggcgggtgcgctaacgcttacccgccctacagttaacgaggcgcactggccgtcggcggcgacgtcagattgagcgcggactgcacgccgcgaggggaacgtacacgccctacgagccccagatgagcgcagcccggcgcaatctgaccagtaag

SEQ ID NO: 414 - DNA, 118 bp, Cronobacter muytjensii
gagaggcgattctcgattttttatgaataatccgtaagtaatcattagcagggataatgagatatggtagcgttacccctgctctcctcatcccttcatgtcgcctgttgggcctttt

SEQ ID NO: 415 - DNA, 404 bp, Cronobacter muytjensii
acgcaggcgttgtgaatggcgggttcgctgcgcttacccgccccacgtgcgacaaataatgaacatgacagcctgttcagagtaagtcagcgaagcgccgcccacgctttcgccgtcagaatcccgccacttctctccatcccttttcctgtcacgcatccaccgccgcgttacgccatttgctgcatatatgccgccacggtggctttcgcgccgtgcgataacaacaggtgataggcttgcgtcactgccgccacaaacgccggctgctgcgcgagatcatcgccaaaaatcgccttcagccccagaagcgcatgtacgcgcgcctcgccatcttcgctgatacacaccgcctgttgaatcgcgtcaagcagcggatcgcaaacctcaatcgccttgccctg

SEQ ID NO: 416 - DNA, 192 bp, Cronobacter muytjensii
gggccatgccaggataaccggcgggccggtacggctcgacaatcatgtgtcgatcgccgggcgggcgcagattagcggcgaggtgatgattgaagatcgcgtgaccatccttgatgacgtgacgatcgccgcgccgccgggcgatgttatccggctgaatggttttaaaacgctgagcggggacgaacgcat

SEQ ID NO: 417 - DNA, 113 bp, Cronobacter muytjensii
agccgcgcccgcaagaccgcccaccacggggcgcacaaaatgtgagctgcgccgcgcagaatcgcgcaaaaagctgaatggctcacagtttgggcgctcgactaaacaggttg

SEQ ID NO: 418 - DNA, 138 bp, Cronobacter muytjensii
gaggagaagttttgacatggcagacaggtgtgaactgtgacagggcgggtgcggcatcgcttacccgccctgagcactgcctgatgcgggcgttgtagcgtgggtaagcgaagccgccccccgcgctacacaccttac

SEQ ID NO: 419 - DNA, 236 bp, Cronobacter muytjensii
accgcccggcgttatttctcatgcggaattacacgcaaggaatattattatcggggcggaaacgcagacgctaattctctttatttacagagggttactgcaatataattcctctgccggcgggctggaatattaccgctctcgctcgacgcttttattcttataaagcacagtccataagccagtaataacgccgggcaacgactggcgcgcccggcgtttttagcgaggcatga

SEQ ID NO: 420 - DNA, 100 bp, Cronobacter muytjensii
ggagatgcggcagaagggaaaagcgcggcgcggctgctgcgataaaacgcccggttttaacaccgccagcgcgtcaaaaaagcaaaaaaaaaaaaaaaaa

SEQ ID NO: 421 - DNA, 202 bp, Cronobacter muytjensii
gattatatttccggcgcataaaatctgaagcgccggaaatatatccatgcctgaacccagcgcatcgataaataaccgcctgatttctgcggtttattattaaccactgctaccatctaatatgtgtattaatatacactgcccggcattccatcccaacatgacgctgaacaatcacagaattaaaaaagggtgttgtaaa

SEQ ID NO: 422 - DNA, 346 bp, Cronobacter muytjensii
gcatcgccgcaccgcctgttctgctcgcacctctcgagccacgttgccttgctcccgtcattccacacgctacgccgcgcgccccttgtcaggcaatctgccggattgccgcaggcgtcagtaaatgcgacaaaatataacaagcgcctgcaaaatatgaattatctttgcagcttttataaagaatttaatattcctgcacccgttgtgcctgaatactccataagtaacaaacgaagcgcggaaatttaaaggcaaccctgaagccccctgaaaaattcaacattaaaacagccgcttcctggaagatttttatttttctgcggtaaaaaagggctcccctttt

SEQ ID NO: 423 - DNA, 156 bp, Cronobacter muytjensii
ccccaatgaacgcccgtcgttctcctttttttgtgtttgccgcccggtattacgccgtgtggctgctgaatatccaggcactctccgtctcgtcggttaacatgacgtcctgtgcctcgccgcttggcagaacaaaacagataatctcccctccag

SEQ ID NO: 424 - DNA, 100 bp, Cronobacter muytjensii
aaaaaattcaacattaaaacagccgcttcctggaagatttttatttttctgcgcatttaacttgcgcctgttaaataccttatctacagttattaatacc

SEQ ID NO: 425 - DNA, 242 bp, Cronobacter muytjensii
ccgccgcgcgcgaccagggtgcgcaggctctgctggcgcgcgtccgtgagctgcgcgcgctgtgcgccggaaagcgtcgcggcgacatagttttccttcatcaccggctgggtaatacaaacgcgcccgcggcggtcaaacgtgccgctcagttccccgctcgccgttcccttcaggcatgaagccgcctcgcccggcagtgtgctgacgcccatcagcaggccaatcactatcgcaatccg

SEQ ID NO: 426 - DNA, 330 bp, Cronobacter muytjensii
cgccgtcaccctgcgccagaatgcccgctacagtcatattacccaggagtatcgctatctggtctatgtgaacagcgccgccagctcgaccgtgttacagcgccgtccgcagcatgaacagcgcgacacaaaagagttcggtctggataaccagctggaagcccggtttgataccgccgatatcagccatacgctgttgaccgggttcgactataagcagagccgcgaccaccagcgcctcgcgcgcgacagcggcgcccgctacaacctggactggacccgccctgtctatggcatcgacatcagcgacagcgcgctgacgccgaccac

SEQ ID NO: 427 - DNA, 364 bp, Cronobacter muytjensii
cccggcttatttttgtttttttatgcacttaatatcaatacttaagttaaattttctttagcatcccccgcccgctcataatgatcagtttttattcagtcttgcggattgttgcggcaataccgtttcacttcactatttaagaaacatagttctccttttggattaagtttttacttaataactggcatgtgattattgcagaacacagtaatggagactatatagttcagggcgtaacgaaaaacgcctcagaacgcgcaacaactcataagcaaaaataaaccttctttaccgttgcttccataagtggatatttccggcaagaactttaccattctgccgctacaattacctggtacgc

SEQ ID NO: 428 - DNA, 104 bp, Cronobacter muytjensii
gcgcgacgcacagaggagctggcgctgatccagcctgaacctgaaaagtaattcgggggcttattccggccccgcgcaatgcgggcgccggttttcatcaagaa

SEQ ID NO: 429 - DNA, 138 bp, Cronobacter muytjensii
tagttcagcgatccccggcagcaccgcctgtggcgtcagcgagcgcagcgagtcgacatagcacgcgtttttgcgcgcggccagcgcggctttctccgccgcgctgaactgcccgtccttcccgccaaaggtaaggat

SEQ ID NO: 430 - DNA, 102 bp, Cronobacter muytjensii
tatcgtggctgaaccgtcatgcggcgtaatcgctatccgcgagcaaaacgctcccagccgctgcgccgacacaaaccgcgagcttgttattgtaaagcgcaa

SEQ ID NO: 431 - DNA, 123 bp, Cronobacter muytjensii
cagcatagtatcagtgcactgccgtcagcgcagaagccctgagatcatttagcatgttgtaactaaaaagtcattaaacctcgctgccgcgaacgaggcgcggcaggggtgacaggggaaaag

SEQ ID NO: 432 - DNA, 103 bp, Cronobacter muytjensii
gacaattaccgttgaatcgcgcccgcagggccgcacgctgcgcttcccgcccctgcgcgcggagacaagcgacagccacaagctgcgcaaggcggacaacgtc

SEQ ID NO: 433 - DNA, 117 bp, Cronobacter muytjensii
ggctgataatattgacagcggcgacgcacgccaggccggtttatccattcagccagcggcaataaaaaaaccaaccccttgaggttggtttttttattggcgaaagcgcatctcgaa

SEQ ID NO: 434 - DNA, 101 bp, Cronobacter muytjensii
gccggaatttatctcaaattagacgaaatcaaacgggtgaggaaaaggatataacagcggaattagcgcggcggtaaatggcgaaagggagtgtgtcagag

SEQ ID NO: 435 - DNA, 118 bp, Cronobacter muytjensii
ccagcaggccttgcgcctgagtttataaaaaggaaggttcttgaggttttttgtttataaaacaatcctttgaaccataaagcagcgttctcctgacggtgtgacactgcgcaccccg

SEQ ID NO: 436 - DNA, 111 bp, Cronobacter muytjensii
acgatgagccgcatatccaccagcggccattgaccggccctctggcggcgcacctggtggcggtaaaagcacgcgagcaggatcagcgcgatacccggcgaccacactggt

SEQ ID NO: 437 - DNA, 104 bp, Cronobacter muytjensii
tgtgccctccttccggcaagcagcgcatgacgggccgcaggtgttccgggcggttcgctgaacgccgccgcgatagcctctgattccaccaccgggcagcgggc

SEQ ID NO: 438 - DNA, 136 bp, Cronobacter muytjensii
ctccccctttttctgaccaaaacttaagtgtggaacaggatacgcatccgcgccagcggtaagcgaagcattggcggtgagattcgcaatggcctgtttgctcaatggattctcaacataatgtcctttttcggcg

SEQ ID NO: 439 - DNA, 148 bp, Cronobacter muytjensii
gaaaatgtgcgccgtatgaggttgtattacctctgctgaggcaaacttattaaaatccacgccatcgcgtggatttttgtttttatgtttagacacgcattcagagcgacgggcgattacgaataacgccgcggtttctctcaggcag

SEQ ID NO: 440 - DNA, 118 bp, Cronobacter muytjensii
atcgcaggcacgccaccagcgcgggcgccgtccgggcgttaagcgcgtagcgcgccacaaaggcgttaatgaaaccatcctgtaccgactggtgctcgtcatccaccagcgccatata

SEQ ID NO: 441 - DNA, 208 bp, Cronobacter muytjensii
aagaggtcatgatttagcgcgttaccgcaataaaaaagcgtggaggtcggatcggttggcgcgtcgtccttctccagcacgtcgcgctgatacgcctgcatcgcctgacgcagctcgtcgatgtattgcgtatcacgatgctcaaagagcgtggtctgcaacagcccctcgctcgtggcgaaacgggcttcaatatggaaacggcaat

SEQ ID NO: 442 - DNA, 281 bp, Cronobacter muytjensii
gacggcaaaatgctgagcaaacccgccgcgcagaacacgcctgccgaagcggaaaccgccgcaccggcgaaagcggaatctgctgcacctgccgaagctaacgcgcctgccgcgccgaccagcagcgctccggctccggctccggctccggctcagtaataccggcgtgacctcccactgccctcgttagggggcagtttttttcgctttctgacgcgcttcgcgctcttttttaacagatatattttccccgccaattttgtcagttgaaatcccccgcc

SEQ ID NO: 443 - DNA, 100 bp, Cronobacter muytjensii
ggtattttccttcattaacagtggggttgacgcgcgaaggcgggagacggaacgcgcgcaaaaggggtttagctgttcgctgcctgagcgccggcaggtg

SEQ ID NO: 444 - DNA, 130 bp, Cronobacter muytjensii
aaaattggagttatgcgacatgcgcacgtcccatctggcgcaaaaacgcccgctgggcggcccgcagctcgccatagctgatacagcgatacggcagcccgtgctccgccgcctgctcgccgataattcg

SEQ ID NO: 445 - DNA, 185 bp, Cronobacter muytjensii
acagcaagtctcgttcatctcgtctccctgacgcgcagaatgcgccgccgtttcgcgcctggcgtagcgggcggcaggctcgcgcgatgcgtccagcgcagaagctcgcacgccacgccctgctgttcaaacagtgcgatcagggctgactgtgccgctgcccgctgcgcctcgtctgcctctgc

SEQ ID NO: 446 - DNA, 148 bp, Cronobacter muytjensii
cgatgatggcacgctgtattgttccagcattttcggcgcgcgtaacgtgccgatacatgagttgcagccccatctgcccgccgccacgccgctgatgcgttataattaggcagcccggtgctgattgtctggacgcccgctattgata

SEQ ID NO: 447 - DNA, 108 bp, Cronobacter muytjensii
gcgaagcgaggttctgccgccctactccggcatgttgccagaatgcacactttaaacgtagcccaatagtttcacttcgtccagacgacacgagattatgtttatcgc

SEQ ID NO: 448 - DNA, 119 bp, Cronobacter muytjensii
tcgtatctctattaccagtggcaactctcgcgctcgcgccagctgcgcgttaacctcaccctgcgcgctgtcgccaagcgcgaaataccagttccctccgttcactgcccacagcgccc

SEQ ID NO: 449 - DNA, 100 bp, Cronobacter muytjensii
agcgcgttgtcaggcgcttgcggcgtcaacgccccgcccggcaccggtgcgcatcattaaaagtatgttgtaactaaatggcacaaaaaagccttacagt

SEQ ID NO: 450 - DNA, 217 bp, Cronobacter muytjensii
agcccacaaaaaaggaagggataaaaaaaagggcgacaggcgacaggcgacaggcgacaggcgacaggcaggaatgatgacccgtgcgcctgttttaagcgatacctgttttcagcgtgcccccgccttcagcaaatgcgcagcatcaggcgcgaaggcccgacgtacaaaaaccgcaccgctacctctgagacaggccgcggcgcagcggagaggc

SEQ ID NO: 451 - DNA, 169 bp, Cronobacter muytjensii
cagcctggcggcgacttcccgtaagtcagcgcgatatgcgaatgcgttgtgagttatgcaatcgcgtagccagacgataaacgatgcctttttattcagcctatgccatgacagacattaacacgacaaaaaagcctcgagcgaaatgtacccaggaacagcatccaga

SEQ ID NO: 452 - DNA, 106 bp, Cronobacter muytjensii
gcggatagcaatgcgtaaaattccgaatattcactccctctacactgccatgtagcgcccggttatactttctgacagcaattatttaaccctgcctggttaccga

SEQ ID NO: 453 - DNA, 228 bp, Cronobacter muytjensii
atttaaaatcagtaagttaacttaaatatccgcaagcgtgctaatcatgcgtcgccgaagggaaagtggtcggatttgtaataagtcgcggtgcgcaactgtgttacaaaatgttacaaggaaggaataagagcctgaatattcttttgattagaatacctaatgtatttaaatgaaccgctgtgccgttcaaatttcgtccttgcgcccattatgggcgtcgttgtc

SEQ ID NO: 454 - DNA, 129 bp, Cronobacter muytjensii
agagacgcataaaatgaaccgtgatttcagaagacaaaaaacaggggtttgcgattgagacagccgcgagtataacgtgagcgtcaggcataaaaaaacctgcccggcggcagggtaaaagggactccc

SEQ ID NO: 455 - DNA, 135 bp, Cronobacter muytjensii
tgtagggttcacagttttctatcacacaggccggctcagaaggtttcccagttttcgctggcagcgacgcttttcggcgcagccgcgtggtccggtgcggatacagcgggtttaacgcgttcagtctgaccgcgc

SEQ ID NO: 456 - DNA, 137 bp, Cronobacter muytjensii
ctgcgctttacagccaccggcgtcaggcggtggctgtgtttacttttcgccgggtcagagaggcttcacgcctttgcggccattcttatcccattatttagcgtttatttcttccgcttattttcatgtattgtgac

SEQ ID NO: 457 - DNA, 101 bp, Cronobacter muytjensii
accgattataaggcttcgaactaagattattcttatataaaggataaatatattctgtgcgttttttccccttctctttccttattaatagctcgggatcg

SEQ ID NO: 458 - DNA, 135 bp, Cronobacter muytjensii
atatcactgcagtgtatgtgtgaagcgggtgttttgcctgtggtggatgcgcgcacgcttaccgacctcaaaatttctcgcccataaaaaagcctggcacgccgatacgcgccaggctcatttttgcggcccgcc

SEQ ID NO: 459 - DNA, 1187 bp, Cronobacter muytjensii
gagttctttcattcggatgtaaaaaaaccgccctgaaggcggtcttgttatcagcaatctctcttaataatgagcgctgtttttttaccgactaatctcgctgtcattcagtgccagcgcgcggatattgccattagttagttcaaaacccgctacaacatgccgggacgcctcgctgctgtttttcgctccggggagcagcacatattccacgatataaggcgtctgcgttttgaacgtgtagaaagacggcgggaggcataactgcccatcttttacatttagcgcaggcttttcacgataccaacgctccttaggcggcgtattgcgtggcgcgatgataataatagatggccaataatcctgtgcatccggcacgctaaagcagacattctgcgaaaccagtgtcactgtcgtcgtttcgctgggggttaatctgtcccctgcgccaggacagccggacagcagaaataccgacagtagccataatttcggggccttaaacataaggaaatccttttagggtgtaggcgtatcgctcacgtaacgtagactcatcgagaacgccatcatacgagacgatgtcctggcttctgtctctgtataccagccattgcgcataaccaaaattttctaacaaaaaatgatcggcaataatttgggcctgctgctccagaggatattgcctcagggtccgtttatccaggccgtaccggtaacttacagcccaactgaaaaagccgcgtagctttacatacattcctctctcgcgctgccatacatgactcatctcatgaatgaaaagatgctgtaaattggcagtcgacgtggagaaatcgtctctgtaccagtaacggaaataaagctcaccattaggagtcaacgctgcgtaatctccttgcattcccaggggaagatagctgtcatgatggatccataccttatggtacgtaatagaattaccgaatacggactttgctaatttgatttcgcctggcgttaatagccgaaggctgccttcctgttgagcttgctctgccataaaaccttcctttaaataagtgagagctccttagcctataattgtaaaagcattttcacttattcagagtcgcaaattctggtaggtgtttcatggatagcgaacgaacagcacgtcatgagggaatgaaatacacgtagaacgt

SEQ ID NO: 460 - DNA, 112 bp, Cronobacter muytjensii
gcttgagttctggcgctcgccggaacggtaaatgaattttccatcgtatcgccgaaattataagccagacgtatgacgcgttattccaccttttcgacaaatatcccgtccg

SEQ ID NO: 461 - DNA, 435 bp, Cronobacter muytjensii
ggcgtcgcgctccttttgccgtgtgatatgcgctctgcctgcaagtaatattaataagataatgcgttcataacgtgcggcagtggcatcagggacacctgacgcataagagaatattttttagcgcagatgataaatttaccgtctgtgaagaggttatttatccggtttcgcaccccttctgttttccgaaaaatagttatcgccttaatcgttcaaggggcaattatcttaacgttatcctcagcgcggatctcactcttattatcgccgaggcatcgcatcagcgctggcgtgacgggccttgcgactgttgattatggaagagtgtttttctcaacaacatttattcctgttttaatctatttaccaagccaatgaaatataaatttaaatagacaccatgaattatttaaaaagaagaaagcgcaatgg

SEQ ID NO: 462 - DNA, 195 bp, Cronobacter muytjensii
cgcctggcgtcagcgtggctctgccgtgcgttgcgccattaactgctgattatatcggtacgccagacatatcagctgctggctgaccacccccgcgcgatggtgcccccagcgcgccacgccgggctgaagacgcaaccagtcggtaaacgccatacaggcctgtagcgaaaccgtcgggatatcgcctggatc

SEQ ID NO: 463 - DNA, 231 bp, Cronobacter muytjensii
gtgcgcacgctccaccagccgcgcttcgcaccaggccgccgcctgcgccagcgtgcggtagcaggcgcgatcgcctcccgtttcaccgcgcgccagcgctgcaaggcatgcctgaatatggcgcagcgctttatctcccggctgccagggcgtgaagattttccggcacgcgcgacactgcaaccgctggcggccggtttgtgtcgtgccgtagcggatggtcagggcgct

SEQ ID NO: 464 - DNA, 117 bp, Cronobacter muytjensii
acagttcacccttaacgacaaaccgatcgctgacgacgcgacctaccgggtggcgaccaatagcttcctggcgcccggcggcgatggttttaccgatttcaacgccgggaaaaataa

SEQ ID NO: 465 - DNA, 430 bp, Cronobacter muytjensii
acctgccagcgagcgctttagcgaagccattattgtgcattcacgctcggcaagcctgacgatcggtatctcgccgaatgatggccatattttatggtcagcagataccggcaactacaacccgacgttcgcgcaaacgttgcccgcaccgcgcctggatatcagcacaattacggatcgcgataatggcgcgcacacggttttcgtcacgcaaaatgcgtatttcagcgataaaagcgatatcagtgccgggaaatttgtcctgtcgctgtttaataaccggtcctgcgcggatacgaccggcaaggcggtcgtgcgccccatgagcgaggccgccactgcaaccgcttatcgcgccctgcctgtgcaggtgctgttttacgccgtcgatctcgcgaccagcaccgttaaacaagtgggcgaggcgctc

SEQ ID NO: 466 - DNA, 150 bp, Cronobacter muytjensii
gtgttatcgcgcgcggttattcgccagcgatgaactgcaatcgttaatgacaacggcgtttgcgcttgcctgatagtttttacgcaaaaaaacaggttttaccccggccagtgcgcggctagagaatcgagcggaacgtgccgccctcaa

SEQ ID NO: 467 - DNA, 134 bp, Cronobacter muytjensii
ggcatcggataacaccaccagcacgctggcggcctgggcatgcagcgcggtaaggccaagcgcgacggtgaggacaaggtgacgaaaattttcataaggcgctcctgagcaataatcgttgaggcgaaggccgg

SEQ ID NO: 468 - DNA, 123 bp, Cronobacter muytjensii
tgcgtatctgcaacagcacggcgagccgcagcatataagcgaccttgcgcaccaccgctgcctgccctttatcatgccgagcagcggacgtatcgccagctggagcctgaacgataacgctca

SEQ ID NO: 469 - DNA, 161 bp, Cronobacter muytjensii
acgcttgcaacactccaggaaacagtggcgagcaatgcggctgtctgtcatccggtgtgtgacgctcgtgacgcgttttcatcaggccgcggccagcttaccgtcggaacacaattcagtgcaggcctcgcaaagagaaagccctggaaatagttaatgcc

SEQ ID NO: 470 - DNA, 301 bp, Cronobacter muytjensii
gcagtcaattaagacaggccctgccagtgtggcatggcttggaaatgaaattgacaaatggattgagaatacattccgcctgagagcgctgcgcccatcgcacaagagtaacaacaatgaatagcaacaaatataacctgattactatcccttgaaagatttacgccctttcgatatgaatctacgactcacccgcaacccggaccatgaagaaatcaaagcctcaatacgtttgcgcggtcctgagcatccccacataatcctgatcacgtaatgtggacacagctctaagcgaaattgt

SEQ ID NO: 471 - DNA, 119 bp, Cronobacter muytjensii
tgaatgtggcttgggaaaatactgaaaaacaaagcgcttactggcttccctcgcggttttcgtcggtcgtcaggcataaaaaaagcccggcgcaaccaccgggcttgtcttattaaaag

SEQ ID NO: 472 - DNA, 252 bp, Cronobacter muytjensii
agaataccaagggtagttttttgaaaatcagtattcaaagtgagcacattatgccttgtgctttaataatgctctgatgaagtaaaaagaaaaatagtaactactttttataaaattaaagttcagatagcgacgataaaatccccatctggcagaaagaattttaaatttgtttgacgataagctttcatggccctcacgataataagcaagcgtctcattaatgcaccatgcataatccaccttttgaag

SEQ ID NO: 473 - DNA, 239 bp, Cronobacter muytjensii
aaagggacttgtattaacgctcagcgttttaagcattaataaaactgccttaacattacgatttgaagggtcactgcctggcgccgctcagcgtggcgaaacaatgctaccgcccctggctcaacagctaccagtgtactgggggtaaagctatcctttcgccaggcacaaggcactctttaacaacagagccgccacaaacgtcctctgttaatgcctgtcagagcgctttttttaca

SEQ ID NO: 474 - DNA, 3966 bp, Cronobacter muytjensii
caattacaaaacaatgatttacacacaaacaagttgtaagttcctagtgtaaccagggccgtaggcagggtgcaagatttttcgatttatcacagcagttatcacactcgaaatagctgaatcacgtaatcaagcgctttaatgagttcatccgcttgtattccgcttaggctgtacaaagcgtaggaaagtggtcattgtcgcaagcttccaattactggccctgtccggcattgccttcttcatgcaagacaggagcaaaagacaaacaacgccagtaaaagggagaaaatactaaagaccaaaaacatcacaacataaccgtataagcaaggttttcagatttgccagaaacttatattgatattcttgatcttccagacttaactaatgcctttagctgcgttctttttacgtgtcaggttaataatatatatttattgggtgtgattgcttcaatctccaatattaaattgggaagtaattaatttactatagccttagctcgggaagagcaagccaatcccctggcgggggtttagttagctttcgcgggagcctggaggggcgcaacgctccccgtataactgctgtgttaagcgatgctatacatagctcaggctataaaacatcaattttaataccgatataatcattacaataacgttaaaattaaatattagagctgtatttccctaaaacatttcctatgcctaagaaacttacagtttccgacaaccttcactctaagaacaacagaccgctagaagaagaagagggaaagaaagtagtatatgaaaattattaacctttctttggccttccttatcggttctcttttaatgttcttcctcttatcgtcactctcatactgtggttttttaaagccagagcgctaacaactctacatcttacctctgtgcatatggacgatcacactaccaatatgtatttatctgctataaacgcatatcgtttttataaggtattttaataacgtactagtaaaccaggtatattgagaatagaaatcaccatcgttaatccagctttgtctttcattcgaaatatcttttcaatacttctcgcttttaatacatcgaaatattcatctaccaatactttttgtgatctacgtcaaaattgtaatcgtttccatgcgggatagttcgcttcataaattaagttcgtttctttaatagagacaaagcctgtttaaggcgctttcaagcgaaaccgctttcaataaatcaataatgttaatggtgatggttaaaatgaaaacttcaaatgtgaaaactgtagttgctgttgctgtacttggcgctatcgctgcttcatctgttaatgctgctcaaactcaatacggctacgaaactgtaagcgctaatgcttcacagcttaacgcgcaactgaatcatatcagccgttttaacagcgccatgaatcaggctgataacgctcctgattctgtttacgctccggctggtcatgctcatggggtgttgtatcctgtattggctccgcataaagttccgactgctgcacctgatgctattccgggcaaacaaccgatgccagccattgttaaacacgatccgaatggcatccctgtaccgtctaaaattcctgcctataacaaagctccggctccgctggctatctacggcacaccgtctaagatgcctgttcctccggctcatatggctatccctcagccactgccgcaagctactcctgacaaaatgcctgtaccgcttaaagttgtagctcctgcaccactggctatctatggcgctccggttaaacagcaacaagcaccagtaatgcaaatggttaacctcactccagctaaacaacctgtagccacgccaactaaattacaagttgaagtcataccggtaaaacagagctatgtaactgataaagtgattacagacactatcaaccctgttacgccatatactaataatgaagtaataaccaatgttaataaaccgacacatgttattactccggtagctgctccggctcaactggttaaagctgaaactaccagtgaaactattgtgaccacgaacaaacctgcccgtgttgatactccagatgtttcggctcctttagtgaaaagtgagccaacgactaaggaaaccattaccacagttaacaaaccagataatattgatactccggttgtaaacactacattggtcaaagctacaactactagtgaaacaatctatccgaaggttgaacaaccaaaactgaatatcgttcagattgataataccaaagctattacttctactgatgtcattgaagataatgctaaaaatggtattgcaaccactaacaaacaagagatcgttatctctgcaaaaccatctaaaatagcgactactaaaactacctcaaataacgcttactcaaatagcgtatacgctcaacaacaagccgtagacgctcaaactgcagccgctgctaacaaatctgctgtagctaatgttaaagctcgtagtgaagctaatagcgctgctgttcagtctcacgctaacacactggctaatcatgaatcacggatcacggcgctggagagtgagagtaataacgctttccgtagtctgaaaagcgatgttgagtctaaccgtaaacgcgctgctgtggggattgcttctgtagctgcaatgtctaacatcccacaagtaaccgactctcaaaactactctgtaggggttggtgttggcagcaatgatgcagaaggtgctgtagctgttggtttctctgctcgggtctctgagcatgtagtaactaaagcttctgtaggtgctggctcttatggcggtgctactgtaggcgcgggtgtttccttcggttggtaatcaaatcttacgcctcaataatggggcgtatagataagaagtctgtctggcactcttggtgtggatttgtcagttacatagcgttggaccggcttcttttctatattcttttgatgaaagcaaacatgattaaaaacatccttctttctgctctcgtttcgcttgcattagtgcttactggtttttggataggcaccatgtatgattcttatatttcatacgataattcaaactgtatgaatggctagcttaaatgtaactttgaatctggtcatattaatagttgaaatgataatgttaatagtgatagttgaggtgttcaaatgaaaaagttaaccttgcttgcaataactgtaactctggctggctgttcttctgctgctgatcgtatggctaaatgtgaagcacagggtattagccgagacacatgctatcttgcagagcaaaacagacaatcgaatatcaatgctgctgctgaaaaacaagccctcgataatgcagctaaacaatatgcacaatcagttcacaagcacttacctgaaggatgtacacaagtgcaagatgctaatggtgaatgtgatgtaaaagcgcctcaagcaagtggaagttataagcagattgccagtgaagcagatcatgtaatgaataaacctatttctgatgctgctgaatacttactttccaaaggttggaagcctgacaatggagagtggcataaaggcaattatagtttacgcttgatagttgaaaatgaagtggtagtaaatagtcaattaataaattaatgatttaacagccctgccattatgcagggtttttatataaggtgccatacataaggcaattatttttgatttattaatttcaagtactgtctattctgccacagttaattgtgaaggagctactgttatttataatgatgtcacgatgaaataataagataatggattgttctgttaagcttctcctgaaattctttctggcgcttttagcttcggaaagatgtcaaacccggatgaacccggcacgtcgtttttcgcagccgctgcgctaacgccactaatatcttcgttaatcccctggc

SEQ ID NO: 475 - DNA, 468 bp, Cronobacter muytjensii
taagcgccattaatgttattcccgacagtgacccgaaaatattccagcgcccgacatcaccaggcgagtgaagagatagcatgacactaataaaaaaaatcaggctggccagaagtgcaacaaaaatgagtcccagataaagctgtaacgcgcgtaaatatccccttgctatccacatcattgctggaattatcagcaggcaaaatagtaagttagttatcaacataccaataataaaggtgggttctggcaacgacaggctatgcgaaacagccacccaaaaataaacttgtggaatggcgaaacttactaccgacaacgccatgctgaaaattaagggaaaaccaaagcgttgccagcccattggcaagctcactttttctttaagttgcgccttaagtaactcaagtgcgtctgttcgcctggttttaaggccattttcaacaaaacggcccaactcaatgcttt

SEQ ID NO: 476 - DNA, 275 bp, Cronobacter muytjensii
tataagcagaccggtaaatgcctgccggcacggcggagaaaggctgacgcgtattttacgtctcgccgcaggatgtgatccgcgcatccgtaatgcaagaaccacgctggcgccttaacctgaggcagcataatgcttacgatgccggcggcgatgtgccgggcgactgtaacgaaataccatagagccagcctttacggtgtcgttactcgtaacagggcccctttacgaaagaaccctgtttttaatggacggttttagcgtcaattcctctg

SEQ ID NO: 477 - DNA, 120 bp, Cronobacter muytjensii
ttgacgaagtacgttcaatgataatgcatgaacatcgcaatgcttcgtggcgcacaggcggccaggccgatcgtgtgagatattattagcggtaacgctgacccattccggggcaggatt

SEQ ID NO: 478 - DNA, 193 bp, Cronobacter muytjensii
gcagtgtttattcatatgcgacatcgtagaggttgaaatcatcgatgcaatactgtcattgatcgcctgctcacgtaacagaatttccgtgacggactcaatggtattgttacacacttcgcgtatgtggttgaatgtaattgccaccagaatcattaatgaaataaacgcaaaaaagagagtgccgaccagg

SEQ ID NO: 479 - DNA, 474 bp, Cronobacter muytjensii
cgtcagcagataaacgttatcaataatgcgtaattgcttatgcatgtaaataacgtgtgatacatctgtgtaaaaatggacttgatattattctgacgttgatgggtttataaataaatgtggagaaaaagtatttcgctctatttaacgccgagacattataactaatcgctagtaattatcattccatttttgtttctgtgttttgcaaatgtgccagcatgctttctgttcagctgtaagaatgttcgcacgataataaataacccaacgcactctttttcgctcgcggtaagccgcctgccaccgtttaacgggctgacggtaacgcgctgtgccaataagagtgagccactgaaccagacacagcggcgggcgcccgtgtccgatgagcgagtatggtgacgccgccacaccaaaatcgtcttaccccggctgaatccgctcttcgccatccgccagccctgaatggat

SEQ ID NO: 480 - DNA, 113 bp, Cronobacter muytjensii
cttacccaccctacaaacactgccatcggcgcttcgcacccgctcccccccactcccctgccccatacccctctcccccgctggcggaggctttttcggtatgacaaacaaca

SEQ ID NO: 481 - DNA, 1375 bp, Cronobacter muytjensii
tcagataacggggcgttggtcgcttcatcgttaaatgacaacggcaatggtcagtatagtgcatcaaccatttaagaccggcggtgacagcatagccctctggagaggacgacaggcgagggttataaataccgacatgtgctggcacagcaggcgaggcggctgcatgttagcatcgtgctgaaatgtttacctattgccccggcccacgacggcgcgcccgtgtcacaggccccccctcatcgccttacgataaaaaattacaccgtcgggattgtgccgccatctatcacatattccatacctcgcttaacaccgcgccgcgctctattaccttacccgccagcctggtctgctaagatgaaataattacccccaacggaaagcgcattatgtatcacctttacggcaccgctcgttctggttctgccgccattgagatggcgctcagagcatgcaacgctgaataccaggtgtgtaaggccagctcatggcaaaaagagagcagcactgaagaattaaaacagcgtaacccgttagtgcagatccccacgttaattcttcctgatgattcagttcttactgaaagctcagccatcatcattcatctcgcgatggaatatccgcacgccgggcttctctcttcggacgcgcgggttcgcgcgcagcaattacgggggctggtttatatcgcggctaactgttacgcctcggttggcattattgactaccccgagcgctggctgccagacagcacagaagatcaacacacgcagcttgcgcagggggcctgccaaaagctttatcagcaatgggatatctttagcggcatcttttatggtacgcaggcctggcagccagaaagccctggcggactggaaatgctggcctgtgtcgtcacccggtggagcaggacgcgcgagcacctgcgcctctcccgacccgatttctgttcttccctgacagaaattgagaacgatgcgcttatcagggcagtcaccgactatcactggggaacctgacgcgctggttttctgcctcagctgctgtcttatcgccttttacacaagaggttcacacaccattatgaaggcgaagcgcttttcgcacgatgatgtcagcaaggggggtcaattgtattgcacaacgctatcccggtgtcattgagggtttctttcagcctggcggcattagccagacagctcgtcctctgatgcggcatagttgtgcgcattcgttcagcagatacgccctgatattctcattttcatccgtccatttttaatatgtgtcaccagataagccgtaactgaaaaggcgcaccacgaaaaaccagccgttacccgcccgataccggcgccctgcagcgtcacgt

SEQ ID NO: 482 - DNA, 142 bp, Cronobacter muytjensii
accccctccgctgttccccgccctgcttttcacaccgaaagatgaatgccgcttacgggtcattgatgcgttttgcttatcggttttgtcacgccgcgtgcaggcgcaccgccgccagtgacgaggcgccctgcgatcatac

SEQ ID NO: 483 - DNA, 150 bp, Cronobacter muytjensii
gtggcatcaggtggcgcagcgcctggccggcctggattaccgggtgttttcaataatgcaggctgggtaaggcgcaagccgcctccatcgtgatggacgggcctgtgacgcatcgcctgccccttacccgttctgacctcacctcgcttt

SEQ ID NO: 484 - DNA, 183 bp, Cronobacter muytjensii
ttttacacgctgtctttttcggtttatgcgcgttttctttcgtttagggtcaaaagagcagaaatatgcaccaggcaggtgcagaagcgttaatcagacaggggccgtcaggcagcggaaaccagaggcagagaagacaaaaagtacgcgggcgcgcggcgctgtcgcccgcgcccgccgtag

SEQ ID NO: 485 - DNA, 117 bp, Cronobacter muytjensii
gctacgttatcaaccccgcttttttatcatcagcagtgtagataaagcgtctctattttggcgagcaaaattgatagcggctgaattaattaactggctaagattgcgcattcgcgc

SEQ ID NO: 486 - DNA, 130 bp, Cronobacter muytjensii
ctaagcttcccggtaaacggcacggcgggcaaccacctggaatctggaattagttaccgtcatttatttatttttaattgttttttaaggaaaattttaaatatactcgaacttgtattcagaagaaaaa

SEQ ID NO: 487 - DNA, 187 bp, Cronobacter muytjensii
ttacctgttcgcccttcacgcaagccatcacccggcgggcagagagagaccgggcgcggatgcctggcttgccgatggcgggcaaaacgtttcctctgccggtacggtgggtgccctgcgctttacccaccctggatgtttcatcaggctgtagggcaggtaagcgaagccgcacccgccatcccac

SEQ ID NO: 488 - DNA, 143 bp, Cronobacter muytjensii
tcgctgtcacggcgggtgccgctgcgctgacccgccctatcttttatgtttgctttggagggaaggtaagcgaagcgcaccccacctctttcgccacggcgaaggcgcacccgcctctttaacccggcgggtgccctttccca

SEQ ID NO: 489 - DNA, 116 bp, Cronobacter muytjensii
gcgattaatcacgttcgcagaattcagaccgggtaagcacaagatgtaagccgggtaagcgcagcgccacccggcattttacccctgtcgcgctgttactcttccactgctggcga

SEQ ID NO: 490 - DNA, 219 bp, Cronobacter muytjensii
cacgagttacgggcgtttttgttagataaccgccattcactgtctggtctgtgcgtgctgaaggtattcaattgtgcctgcctgaacagtgaacatggcattgcactaacggtttctggcaataccgccccagagaaaaaccgggccagaagataaaagaaaaccctctgtaaaacagagggtttggctatttactggacaataatcagaggattaccg

SEQ ID NO: 491 - DNA, 253 bp, Cronobacter muytjensii
aaaaggcaggccgcgaaagcgccctgccttttttattgtttatttgggatggcggatggatttgattggtgggatggcgggtgcgctttgcttacccgccctactcctgatacctgcccgcaaaacaggtagggtgggtaagcgcagctcacccaccaacgcctgaacgcaatgcacgggtgaattcacttacctgccctgcggttcaggccggtgcgtattcccgtagggtgggtaagcgcagcgcaaaaca

SEQ ID NO: 492 - DNA, 152 bp, Cronobacter muytjensii
aggtggagtggtgatggcgggtaggcttgcgaccgcgggtagatttatcaaagcgggtgcgctttgcttacccgcctgcgccccctgcaaggggttcgcttttagagtggctaagcgccccctctttatcactcaaccggcacaaaaaaagc

SEQ ID NO: 493 - DNA, 116 bp, Cronobacter muytjensii
ttaacgcgcattattgcttaacgcaacaatttcgaggagctcttaaaaaaggtacgttcagaaaattgctaaaaatgatcagaaaggcggtattgctgaaggtttgtgcgaaggcc

SEQ ID NO: 494 - DNA, 112 bp, Cronobacter muytjensii
cagcgaaataaatcgcaggaattacgcctttaagtgtaataattattttacagaaacgaaaaggcgggtctccccgccctgcgttatggcgcgttttgcgcgagaggtttgc

SEQ ID NO: 495 - DNA, 122 bp, Cronobacter muytjensii
ccgtaacgcgaaggttgcgcgataaaacaaaaaaggtgcccagggcaccttttttattgcgcgttacaatttgcgcgtcgcagcgggctggattgccgtctgcaacattcccgcactgctcg

SEQ ID NO: 496 - DNA, 202 bp, Cronobacter muytjensii
cgtaaagggctggcgaccaataacgggggcgggttggtgctgagtagcaggcgcgctgcgtttacctgttcaacataacgacaacggcaagtattttaaggtggatgcgctgcgctaccccactccacacgatcgccataaagataactgtgcgccgagggccaggggcagcgcccccgccaaagcaacgccagtcgccccc

SEQ ID NO: 497 - DNA, 111 bp, Cronobacter muytjensii
gcttaaccttttatttgtcatttatgaccaattttttcctgcaaaataaatatagcgagcgggtaatttcgtgagcaaaatctcatttttatgtaacatgatgaagattga

SEQ ID NO: 498 - DNA, 168 bp, Cronobacter muytjensii
gcgtattcgggctgctaacagatacccgtatctacagcatcatgcacaagaacaaattacacgccgcgcttcttcttgcgccgtttcagcgcctgttatccgccgcaccttgatcttttacggcttgccctctcatcctaaatcccccaccatacctggacgtcactc

SEQ ID NO: 499 - DNA, 207 bp, Cronobacter muytjensii
gaaacggggattgcctgtaaccgaaaacagacgccagcgcagaggctctaagcgatgtcctgaaatctttcgtcaagaaacgcccccgacgggtctgccggtataagaccatcaaaaaatacccaataacacacaccagtgcatggccgggtttggcgatagcaaaaatatttatacgggttgtgaataacgcaaaacatttaacgc

SEQ ID NO: 500 - DNA, 500 bp, Cronobacter muytjensii
gtgttgtcggtgtgtgagaaggcaggtggatgagatagcaggccgctatgatggcaggtatccgccctgcaaaacccccttttttttttttttataggtggtaagcaaagcgcccccgccggggcgcctcatcgcccatcaacgaacaagaacgcggctttctgcgaacgcctgttcgctaagccggtggtaaaacgcgaggagctgcctgagcaatacctgaatgtcttcctcacaccagtcttgcaacgggcgggcgtgtgggccgctgaaatggtcactaagcacctgcagttcaggtcgtaacccctgcgccagcgcagcgggtggaatatccatcaggcactcaaaccagaagcgcagaagttttttgcgaagccgcccttcgcaggtgagcatcagcacgccccgctcaaagtggtgtaaaacatcgatcgttgtgttcatgttccttgctaaaagccgtgaaaaacaggcgttcattatccgccacccccacg

SEQ ID NO: 501 - DNA, 112 bp, Cronobacter muytjensii
taatttttttctgctcccccctcacctttccgccctgcttaatatttttcaggccctttttgcgtccaggcgctgccatgcctgcgtctgcgcgtcgttgtcgctccgcctg

SEQ ID NO: 502 - DNA, 148 bp, Cronobacter muytjensii
agggctgaattgccgtcagaattatttgctaaaaaattgtaaaattcacgaaaaagacggagacgaaaaatatcgtctcctgtcgcctgccgctcagcccagtaataccgggaaataatggcgttttgtcgcagcatttcgccgtgcg

SEQ ID NO: 503 - DNA, 129 bp, Cronobacter muytjensii
taacaggcgtattttttataaatctatcagccgcttactgggcatatgcgtaacgcctgttgcactgcccgcacgaatccgggcaggcttacggcggatggccccggcgtcatttttcccacccgtctt

SEQ ID NO: 504 - DNA, 272 bp, Cronobacter muytjensii
cgttcgcctgaaatgcgctttgcgcgcccagggccgtgcgttatgtctgcaattgcgccgtcaccttttaacgccgtgtcccgcgcttcgcgtcatcagttattagttcatttttgatgataaagccacgttgcggcaggccgactgcgcgaaaatatggagctgcctggcgactggcctctgctgttggaataaaggcgggtgttcggccgtaaaaaaaccgccctgaggcggttttttcatgcatcaccacggtaactacgcaggtggaa

SEQ ID NO: 505 - DNA, 288 bp, Cronobacter muytjensii
tggcagcggcggcgcgctcttatcagcgatggccccttaattcaggtcgctggcaggcccaccgggcggcggttaccatggcaatggacggcgctgcgaaaacaaggaaacgtgagaacgatggtacgcatactgacgttatttattctgacgctgacgatggctggttttgccgttcaggcgcaaccgctcgccgtgccgccgatgcgcggttttgttaacgacccggcagatatcctggagggactggaaaagctcgcgttaatcaacgatgtgtcttctcttaat

SEQ ID NO: 506 - DNA, 246 bp, Cronobacter muytjensii
tgtcgcgctgagttttattaaaaacagtgatacgtaaccgggtcgacgcttctcctgtacctcgaatctgtctattcgcaccatcgcgggattggttattttttcccatcctttgccttcgcaagagattgccccacggtgcgtttcaaggctgccatcccgcagacgccagccggtctgctctgcatcagcagacggcgcaccttcaaagcgcccattactgtttgcgtcccactgcactactac

SEQ ID NO: 507 - DNA, 100 bp, Cronobacter muytjensii
tatttcgatctccggccagggcggagaaaactgattctttgcgcccttacggcacgtttgctctttgtcgttctgcgtgccaaggcaccagccttttggg

SEQ ID NO: 508 - DNA, 293 bp, Cronobacter muytjensii
cgcatcctgaagcgcgcgatgcgccggaaaaaacccctctgtttatcccccttttttttttttgccggtataaggaacgcgtaatggctaaaagcaaaaccattcccctctcttttgtgacccgcagggaccgcgacaccggaaacgaggtgattcgcctgacgcccccgcatatcgtctgccaccgtaactatttctaccagaaatgctttacccgcgacgcgcgcaaactgatcttcggcggcgccttcgaagggcactggaattattacctgctggatctcgatgcgcag

SEQ ID NO: 509 - DNA, 127 bp, Cronobacter muytjensii
agtggcgattcagcgaatggcgggcgcgccgttgacgtgctttcgcctctctgatgggaaaatcgccggggtgtggaaatatgtcgcgtcggtgaaagcgttccgttcgccatgacaccctctccct

SEQ ID NO: 510 - DNA, 159 bp, Cronobacter muytjensii
cttactttgttttgtttgcgcgcgccgctgaaagaaattttcaaataaagattattaatcaaatagttaattaataaatgcgttactgcgcctcatcgtttcccgggctacaaaggcgcagccaattaccgtcagattttccgtttgctatacggctga

SEQ ID NO: 511 - DNA, 108 bp, Cronobacter muytjensii
gctgcgctttgtcgcaattaaaaacccatgacaaataaggatcaccttacagataaactctgctgaaaataatattgggcgaaacgcaaaaaaaaaccgcccctgact

SEQ ID NO: 512 - DNA, 209 bp, Cronobacter muytjensii
atttattttgagtgaaattataacaacgaattttttaggtaataaatcgcgaatcacctcaaataccataataatcaacaacgcaatcgattcgggagatataataacgtcaacagcattattagcagcgaaaggaagtgcgctttatcgccagtaggcggcaaaacgcaccgaaaaagagggggaaaacgaaggaaaggaaacggccg

SEQ ID NO: 513 - DNA, 111 bp, Cronobacter muytjensii
cacgtcgcgtgctgcctcattttttcagaatgagacgccgcgacgataaaacacgtaagcaagagcttatttggaaaatacgcttgccgccgcgcccgggttaagggcgat

SEQ ID NO: 514 - DNA, 169 bp, Cronobacter muytjensii
tgactaacaggcgatgcgccgcctgtttatgctgatgccgcgccttcgctttacccaccgatctcaatctatatgacaggcgtaatcaagccgctgtcatagcgctgaccatcttatggttaagcaatgcgattgcatcaaggtggcacagggggcattacgcagtgaa

SEQ ID NO: 515 - DNA, 109 bp, Cronobacter muytjensii
ccgccaaaacccggcgcacggaatgcgcccgtcatgaccgccaggccggtaaccatcagcctggcgggaattcaatggatgttgattaggtgtatcaggcgagattgtg

SEQ ID NO: 516 - DNA, 166 bp, Cronobacter muytjensii
tgtcagccctctcccctgcggagagggagccaaccggcgcccgctatcagatctggcgggtgcgctttacttcccgccctgcaatacggcttctgtctgtcccgtagggcggataagcgcagcgccacccgcctgcctctcttccgccctcgtcaatccgctccgg

SEQ ID NO: 517 - DNA, 126 bp, Cronobacter muytjensii
cctgaggaaaagaaaagccgggttgcgttacgcatacccggcttacgcgccgatattgcaggccgggcagcgttacgccgcccgacgaacggcattagtacagcagacgagcgcgaatagtacccg

SEQ ID NO: 518 - DNA, 111 bp, Cronobacter muytjensii
taaagtggcagtcaggtgctcagtgtagggggccattgccattagaaaaaacgaataatattaatcgtcaataagaaatgctaatgaacggagttaaaaaaacggcccccc

SEQ ID NO: 519 - DNA, 156 bp, Cronobacter muytjensii
ctgttcctgaataacgaacaagaaaagagggtcactccagcgaatcatggggggttacgcgcctgcggctgcgtcctacaatgccatccgctccacactaacaaaggaaagaggatggcgacgccagaagaatacgaaaatcaggcaaagctgatg

SEQ ID NO: 520 - DNA, 137 bp, Cronobacter muytjensii
agcgtccgcagacgccgcggtgacgcatgttaccggcctgctgcaaagcgcccctgggcacgacgaaacgctgcaagcgcttgagcatgcccgcgcgctggctcgcgcaccgatcgccccgcaggaggcaatatcat

SEQ ID NO: 521 - DNA, 114 bp, Cronobacter muytjensii
cgcatttcagattatgaccatacgccgttcgcctgcgcattacgtgaaaaatacccgggggattaaccataaaaaacgggaggcacgctggcctcccgttcgctcttatccgcg

SEQ ID NO: 522 - DNA, 316 bp, Cronobacter muytjensii
tatataatctctttaacgttatcgcgttatgacgctcgctaccagcctcataaaatgacttaataatttcccgcactgccagtgacgtaaagcgcgccgtggttacaacagataaattaacaacagcttatataatgccgggagaggttatattttgtgattgccagcgcaatctactgaattaataaaagaggcgcgcgccaaacccgcgacggtaaataaacacgcatcagtaattcagaaaaggattagcaacggtcattttattaccggataaaacctgtcgttaataacggtaagcattgtcactgataag

SEQ ID NO: 523 - DNA, 156 bp, Cronobacter muytjensii
cttttgacaacgcgggtgcgccgggttatggcctcaatggcagtgacgccgcgcttacccgctctgcttatggatatagccttgatcggctggataagcaaagcgtatccaccttgaggctcaggtacaaaaaagccgcttcgcagcgggtcgggt

SEQ ID NO: 524 - DNA, 135 bp, Cronobacter muytjensii
cgcgcacgttacaatgcctgtaaacctggcgccgcaagcatggcgtgtttaactcatcattaaacggataaacgggtcacccacacctcaatccggtgacatctctgtgcgatgaatgatagtcgcgatgaatgt

SEQ ID NO: 525 - DNA, 483 bp, Cronobacter muytjensii
ctgattaatatacacaccgatacacacaaggacaatccgccagcgcgcggcaccggcagacctttgcgcgcactatgcgcgtttttcaggagacgtgctgaacggcgcgaacacgctgcgaggcgtgttcagaaacactctgcgtcaggcaccgatttttgattaccaggcaccctccccctcatcctccatccagggagcgtcttcggggaagtcatagggaaaatccaggcgctcaaggtcagggggcgcgtcgcgataaagcgcaatctgcgcaggggaaaagagcggctgcgcattgcgggcgaggtgcagcggcggctcaccgggcagcgggccgccgggcgtggcactgagccctgacagcggctcgccgtcgcaatacgccacgccaaacgccgatggcgtacagccgttcgccgacacgctcgcggcgtcgcttgcgggcgaataattttgcgtccagagcaccgcgacattaag

SEQ ID NO: 526 - DNA, 180 bp, Cronobacter muytjensii
ctctacaaggtgaataccgcgcagaagagctacccaaaagggccgctccgtggtgagaggcgctgcgcttcccctgctctatcgttttaccgcgcgttgcttacgcgccccacaaaaatacagcccctgtcgtaggtcgggtaagcgccttttggcaaaaacccccgccatttctacgca

SEQ ID NO: 527 - DNA, 174 bp, Cronobacter muytjensii
ttaaaaagtgattttctaagcactcgattaactgtctatttttatatttcattgatttttatattagaaaataaaaccataaaataagtaatcatcatattcgcataagcatgctcaaaccggcggcgctttcgcccacccgacaacgggcctatgctgacagagcgacgacaa

SEQ ID NO: 528 - DNA, 102 bp, Cronobacter muytjensii
cgattgccggcccgcaatccaccacgtattacagcaatactgattacaccaactttggcggcggtattactaacagcggcgcgataggcacccttaataacc

SEQ ID NO: 529 - DNA, 114 bp, Cronobacter muytjensii
ctcgattatcagcaataccaatggctattattataacagcggcgcgatatataactccggcaccattaatacgttgcataacacgggcaccatcgccagcaccaataacaacac

SEQ ID NO: 530 - DNA, 149 bp, Cronobacter muytjensii
ggcgaccaccgcgcggcgctgacgtgcggcacgtataaaaaacccgccgccggaaaaccggggcgggttttagcgcctctgtgcgcaggtaaaccgttacgccgggcttgccgcctgcggcgagtcgtcctgtggtttaccgtcctgag

SEQ ID NO: 531 - DNA, 133 bp, Cronobacter muytjensii
ccgcagcgtcaccggcgattttacacaccgtcattttatcgacacgcattagctgaatcgttaaagctaaaaatgcatcccttcacattttcaaacacgcaattcaatacattttcacagtaaacgccacacc

SEQ ID NO: 532 - DNA, 167 bp, Cronobacter muytjensii
atggagagccgcgggaaacggcatgaacggcgggtgcgctttgcgtacgtgctccacacccctttatctgccctttttcgtaaggcgggtcagcgcagcgcaccgaccacattattgaccgccccgccccgccgcctgcttcgccgcaaacgccgcaatattactgt

SEQ ID NO: 533 - DNA, 142 bp, Cronobacter muytjensii
gtcgtgcgatgccgtgagtgcgccggccgttatagcgggcgcgctggtcgttgcggcgggtgcgcttaatcgcccactttcccttccagggagagggccggggtgagggtcaattccctcacggccccctcgccagaagccg

SEQ ID NO: 534 - DNA, 168 bp, Cronobacter muytjensii
cttgcacgctcaaactgcgtggcgaagtaccagggcgcaggcgcaggaaagcctgccaggccgctgcgctcaaggcgcgtgagctggtgattcgcataaagcccggtcgcgctgaaggcgataagcgtgagcgccagagcgccgcacagggcccgtggccactggcgg

SEQ ID NO: 535 - DNA, 2934 bp, Cronobacter muytjensii
ttcgagtcagaaaggcacagcagcgcctgccacagcaggagtgccgccagcagcacccacacgccggggttgccgcgcgcctgcaaaagccacggcagaagcagcagcagcccgcccgccagcagcagcggctgacgctccgccccgcctttgttatgccgccacgccagcaccatcatcaccagccccagccagcagagaaacgtgaggttaaaaggcagcgctacgccataaccgcccgaatcaggaagataaaacagcgtcaggcagagtaataataaaaaaagggttttcataatcagaaagtaataaaaaggaaagacaattctttccctaagctatttagcacagaaaaaggcacagagtttgcagatctattaataaggcatcatgaccagaacgctggaaccggtacaggcatcttcataagccagcccgataggctatctgagactttaacctcatttgcgccttcatcaagggatattttcctgccaacagccatatcgttaaccttaaaatgtcatacagagcatttaataaggtgccattaccaatacactactacctgaatgaataccttcagtacttacacccgtaagcatatcttttatggtcaacgtcgaatcaccctcaggtaagtctatttttgtttttaatggcttattacccaccgttattatttctgattttgattttccatcatccaaatacacatacggttcatcagtaaccaaacgaaaagtaataaccgtcggattagcacactgtatgttcacttgcgcactggctgaatgaccttcagcattctttaaagtgatattaccgtgatccagaactatttctggtgttgtaagtttacaccattcatttacaggaggtacgttagtacatcctgtaggggcgtaaacgttaatccatggctgtggcgcagtatttataggcataaagacatatcccatgcacatagtcggatcaggtgcataaggtgtgtatccgagagcagtaatcttatttccaccgtcatagtaccaatccaggaacagcttacttatagtatttttaccgtcagatggtttcatgcctaacgcgttaacaagattattttgatattttaatgctattacaagataacccccagtcgggggaacccagtcccctgcggaaccagcttcaataaccgtatgcgtaaaatggtaagaccattgattgtatatttcaggtgtagtagcagtaatgctggttattaccggaagctggctgccccatgcattgaatgcacacaaaaaaaaataacacgttcaggaatcttttcatcactacttttccttactggtaagccagcacaaaattcgccgtcgcggtaaagtcaccagctatcagcgatttattgacgattacggttggccgtgcctggatataagcattaaacgttagcgtattatttccgctggtcagttgcgtatacgggctggctttattaatggtcagcggcgtgccatccgccagcgtcaacccaatcgccacgcctttcgccgtactggaagcatccagcgccagcagctccgtcagttcggtatccgccgttccctgaaaagtgacgctgaccgtgctcatcattgacggatcgcattccagtagatgaatgctgaacggctgggattgagtgcgctggtattggtaaagatttttttcaattaccgaactgaagtcgagttcgatatcagtatctgcatccggtagcgtacagggctccgagaccagcgccccggaaaaatgcacgttatcttccgcggcaggagcgccggcggaaaacaccagcgccagcgcggccagtaaaattttgttcatgtccgttcctacatataatccgcgcgcagcgtcatggtggcctcaaaggcgcctgcggtgagcgtcaccgccgggtcctgcaccggcaccgcctggatcgccggcgggctcgccgggttgcttaccgccacgcgcttcgcgaaggtcgccggctggccgtccaccagaatgcggaggccgagcccggttttgtcggttttcaccgccgaggcgtcgaacgttgccggagcggtggtgtccaccacaatggcgagcccgccggcggtatagcccgccccgcagtccagcgtgtagctcaccggctgcttatagttgttgccgtcaattttgttgacgccgaggtcgttgccgaacgctacctcaatggtccgaccgttgctgatggtgcacggcggcgctaccagcgtgccgtgaaatgccatgttttcggcggcctgtgcgtagagcggcagcgccaggctgaatatgtacagtaatcgtttcactggtagctcaccgtcatggttgcaccggcggtgaaatcgccggtgggtaggcgtgctccgggctgctgaaccagcagcgctgtgagcgccggtttactggtcgccgatgccagcgtcagatccgtgttaagagcgtagtcggcaccattcgctttcatctttacccccagcgccggaatggttgttttcagcacagtattgtcaaagtccgctcccgtgccgctaatacgcatcaccagtgtcttgctctggtcggctttggtgcagtccagggtgtaattgacgggcttttccactgtgcccttcgccacctcagtggttatgacgctgtcgccaaaatcgacatcaatgagttgatcgttgttgataacgcagggatcggcaaagattgccacttttacagtaatgttagctgtgttgttttctgcccatgtattagcgccaactaacccacttaacacaagtattgtgctgacccaaaacgttctgctcatgcccccccctactcgtatatcatgctgaagttaatcagcgcatggtaaggccctgccgtgaacggcgcggcggtgcgctcgggcgccagggtgaagatcacctg

SEQ ID NO: 536 - DNA, 104 bp, Cronobacter muytjensii
cgttgcagtattagcccgggtgtgactgaccgtgtaaggcagccgcacccggcatcctacataacgcccggtctttacgccgcccgctcgccccggttcgccac

SEQ ID NO: 537 - DNA, 117 bp, Cronobacter muytjensii
tgcgccgggtagcgtcgagctggttgaacatctgcaaagtctctccgtcactcgcctcgtatctaccgacgcggtgacggcggatgtcgcgcctgcggtgattgcgccggaagagat

SEQ ID NO: 538 - DNA, 106 bp, Cronobacter muytjensii
agtgaggcgtggagtaaaggtgggcgcgcgtcgcttaacccccctacgtctggcgcctgttatggataaggcaggtaaacgcagcgcattcgccacagacccgccc

SEQ ID NO: 539 - DNA, 118 bp, Cronobacter muytjensii
ttgctcctgcgcgcggtgcgcagcctccgtaccccccggttgcacatccgcgcgctgacgccggtcggttctcacccagaagactgcggctgcggccatcacggcgtcggcaagacga

SEQ ID NO: 540 - DNA, 124 bp, Cronobacter muytjensii
agacgacattttgtcgccacgctatcgttattgcgatccagcccttattttcgcgttcattctaaaaaaagaatgagaaaaaccaggaaagcggcgtaaaatagaaaacagataagccatttct

SEQ ID NO: 541 - DNA, 132 bp, Cronobacter muytjensii
tggctctcatttaaatacaaaaaagacgccacgaaatataatattaaaattagcaatcgaatatataatagcggcgcatgcagtgaacaataataatcatacctgcgcgctctgtttatttaacgcaagacg

SEQ ID NO: 542 - DNA, 103 bp, Cronobacter muytjensii
gtgtatgactctcgtcataacgcgtgcggctctcgtcgtcgtagtcacggttatcctgcgtgtcgcgactatccgggcgatacgcgtcgttgatcgcttctgt

SEQ ID NO: 543 - DNA, 156 bp, Cronobacter muytjensii
tgcaatacgggcatttcagcacgcctgcccgggaataaaataccgtaaatcatcgcctttacgggagcgcgtaataatattctgttaagcgaactgttatttaaaaagactataaaatgcgagcgttattccagaaaccctgcaaacggtgcattg

SEQ ID NO: 544 - DNA, 311 bp, Cronobacter muytjensii
gcgccaccgcgtaaaagcgctatgccgttcatttatggcttatttctatcgccagccagaggcggaacgggttgatgcttaaaaagcctccgaatggcttacatattaccgttttcgcatcaggtcagtggttaatggcgcagataaagccatagttcagcgagaggcgcgcagaaaagcggcagaaaagaaagataaataacgcgctgaataagcacagggcgacaaagcaggaaagcgcagaaataaaaccgcggataaagaaaaagccctgccggaggcagagcttttcggtgcatgctgacggggcg

SEQ ID NO: 545 - DNA, 101 bp, Cronobacter muytjensii
cgaagggctttcaggccattaataccgatgcattttcccttcacgctcaggacgatatccctaaaggtcatccagtgcgcgacggcatttttgttttcaaa

SEQ ID NO: 546 - DNA, 153 bp, Cronobacter muytjensii
cgacgatatccctaaaggtcatccagtgcgccttttgttttcaaacaaaatattattaatggggtaacagggattttcatctggcaggttcagacccgctttatgttcatcctttgagccagaaagtaaggatttactttcagtagcaaggct

SEQ ID NO: 547 - DNA, 503 bp, Cronobacter muytjensii
ataagccggggaatgcacgccagccagtactgaaataatcgcgatacagacgcttgaacgacgaacactcacatgaattccttaacgatccctgtttcccggcttccgtttatacgcgcgacgtaaacggcttccctgatcctgtaataaaaaatagccggcagatatatagtgccgcttccggcatcgcaaagaaaacctgtaagaaagtgcgaataactctgcggaaaaatgaaagcggggaataagagccgcaaataattgaggcggtaatgcgtgattagcgcatccataaataaacagatgcgtaaaacagactccactaaagctcgcgaaaagggtgcaggtgagttttacgttaagtcgagaaattaacttgaggctgacttattaaattaatatatttcattcggcttacaaattaacgggtaatcattaagaattgacgcaatcccggtggcgttaaaagaggaaaaagcgctgcgaagcagcgctttgagaaa

SEQ ID NO: 548 - DNA, 374 bp, Cronobacter muytjensii
ccatagggtgtcgtaagacgaggcgcgtcagcgtgttatggccttcgtctgtcatcattataagtggttaacgcaaggaagtcggcgggacggtgatttatggcgggcgtgtttgcgcggggcattggcggatgcgtttgcgcaggcaccaatggcgggtggcgctgcgcttaccgccctataaatccatcttacgactggtaagataggtaagctgagcgcattcaacggcgagcggatgacggcgtctggccgtcggcggcaaagcctggttgcgcgcggactgcacgttggcggggcgcgtacacatagtacgtgacccgcgtgaatacagcccagacgcaagatggcgagtaagccaggccagaatgacc

SEQ ID NO: 549 - DNA, 149 bp, Cronobacter muytjensii
acgggagcgccgggcagcggctatgccgttcccgacacgcgttaaatgaaaatgccggaggggcgtggcgcatccggcccgtcccctgactctgcttcactcaccgtcaagggcgtcagcccggaaatagcaggttccgtcgggctgct

SEQ ID NO: 550 - DNA, 115 bp, Cronobacter muytjensii
attacggtgggggcgcttcgcttacccgccctgcatctacaaaacgtgttgttgcagggggtaagcctgcgcaccgccatcaacgctatccatcgcactgaccttcgggcccctg

SEQ ID NO: 551 - DNA, 125 bp, Cronobacter muytjensii
agatgcaaccttttgaatttgaataaaataaagggaaagcggagagtgaattaattttcaaaaacaaaaaaaaaacccttctgaagcgtgctgaaacgcttaaggatcttgtgcgtggaatttta

SEQ ID NO: 552 - DNA, 216 bp, Cronobacter muytjensii
aatcagccttaatgttctacgctggcagaccgtctgctggcgtggcatcgacgacggtctttccgcgtcgttgtcgggcccgcgaccgccctgctggtggtctgcttgtcatcgtgattctgtctccagaggtagccagcctgcgcgctgcgggtcgctgtcccgctacgctaaaacgcataggtttcatccccggagagggatagcaacggtcag

SEQ ID NO: 553 - DNA, 162 bp, Cronobacter muytjensii
tcgccagcaccgcccccaatattatcgcgtgattcggaatagggggggggggggggggggggggaggggacattctgtttaatttccccactgtttcgcttcccgttccgtcccggttttacctcgctctcgccttgcatcagatattcacgccataaaatt

SEQ ID NO: 554 - DNA, 111 bp, Cronobacter muytjensii
cgcgcgctgccgttgtaaattgcgtagcgtcacggcctgctgttgaagctgcgcctccagcgggttaatgctgccggccagcggcgccagccccccgtaagccgtccccac

SEQ ID NO: 555 - DNA, 141 bp, Cronobacter muytjensii
tcggcgtttttcgcctgttgtagctgcgccttttgggcggtaatggcgagcgtttgcgcctcaagtcgctgctgaagcacccgctgctgcctggcgataacgcgataagtcatacccgctgcaagcgctgtgacccatgct

SEQ ID NO: 556 - DNA, 228 bp, Cronobacter muytjensii
gcatccgcgacagtaaaaggccgggaaaccggccttttttattgggtcagggatgacggattgtagcgggttttggcgcgtcggatgtgcgaccacgggtacgcttacccgccctacgttcaacagcttttttgtagagtcgataagcgcagggaggataagcgcagcgcatccacttttaacagcgacgccgctgccccctgcggccacgctctttatttaaataac

SEQ ID NO: 557 - DNA, 131 bp, Cronobacter muytjensii
gtgccaaataaataacacgcggatattcaggcaaaccgccactacgcccgaaattaaatttaaaactatgaataataagcaataacggcatataaaacgcctactgacgcgtgacagcgctgatttttttg

SEQ ID NO: 558 - DNA, 297 bp, Cronobacter muytjensii
cggctggcggtgaaaacgggcaaaagaacgtgagatttctgcaacaggaggacgcatcagagaggcggtatgaggggcgcacagaggcgtctgcgaaccgttatgtaacagaagaaatgatttctcaccaaaaataacgcgtaacgcctgtttttgttactttgtgacgtgattccacccacaaaacccactgaaaaacagcctgtccacttacctttattgccctgatggcggaattacgcacagcgccttttttatgccaacccagagcccgtgcctgtttgcgagaagtggaca

SEQ ID NO: 559 - DNA, 104 bp, Cronobacter muytjensii
atcctgcgtggtcgcgtctttttacctgtctaatccgcctgtcgccacgtctttctgtcgctaaaatcaacaaaatcgtattactatcgtttatctgaaacgcc

SEQ ID NO: 560 - DNA, 114 bp, Cronobacter muytjensii
atcacgtgcagagcggtaatcgcctgatgacttgcaagccgcctgtagggcgggtaagcgcagcgcatccgccacgacagaccgacaaccttattcagggcgggtaaggcaacg

SEQ ID NO: 561 - DNA, 129 bp, Cronobacter muytjensii
aaacgtctggcgccgcaggctcgatgaccggctcttcaacctcaatgaccggctcttcatcggcgagcgtgtcaatagcagccgtctcttcgataacgtcttcttcaacaatcgtctcgcgggccgtct

SEQ ID NO: 562 - DNA, 129 bp, Cronobacter muytjensii; identical to SEQ ID NO: 561

SEQ ID NO: 563 - DNA, 118 bp, Cronobacter muytjensii
ccgccaatgcgttaaggctgttgcgccgacgaggctggtctggaaggcaaatgctatgacccgttgtttacagggcgggtaaacagcgcgcatacccgccttttgcaaacacagcccg

SEQ ID NO: 564 - DNA, 143 bp, Cronobacter muytjensii
ctcagcagtgcgcttttcaaccgcgtcggcggtgcatcatgttgaaaacggtatgagaaatccgcattcgcattccgggagtgccagacatgcgacggggcagcgctgaacgctggcgcagaaagcaaagcggcgaaataaaa

SEQ ID NO: 565 - DNA, 102 bp, Cronobacter muytjensii
ccgcgccctgcctgaattagcggggaaagcgcgcgccggatgacagcggcggtttttcgggcaagactgttctgcctgttcacgcgacggagattgtatgcc

SEQ ID NO: 566 - DNA, 259 bp, Cronobacter muytjensii
cccccacgtattaacgaaaaggcggcccccgggcggccttttttgtttatggcgggaagcgaaggctggatggcgggtgtgtcaacggcgtgaaaaggccggggcctgccacgtgcttaaacgacatgcgcttaaaccacgccaccggccttgcgcacgtctcattcccagaaaacgaaaccccgtcgaacacgacaccgacggggttttcgttcaacgcgggcgcgacgggcacccgctttttacgacgatactggag

SEQ ID NO: 567 - DNA, 148 bp, Cronobacter muytjensii
ccggtgtggtggagcgtggcgggggcgcaggcttacccgccctataacgacgctaccggtattattcgcagggacacgcgaagcgcatccaccacggcctgccataacacccataaaaaaagccgacgctctgcgtcggctttttgtt

SEQ ID NO: 568 - DNA, 156 bp, Cronobacter muytjensii
tcccctcgctctcaggagagagaagcccccttgcggctgcacaaagatatggcctgagaccgggcgccagacgcaacaaaaagtatcccctcacccgccagacgagaacgattttcccttctccgttcgggagagggccggggtgagcggtcgctc

SEQ ID NO: 569 - DNA, 1274 bp, Cronobacter muytjensii
tggtttatgatgtgtagcccttctgctgaatgcccgcctctcttcttctcctgagtattttttctgtcactctaattattaaggcaaataacagtaaggtcagaatagtggtagaactcacaaaaaacagctcaaacagcgtatccatttgtccttcaagatcaattatttgttttgccgaagaataatgattaacaagataccaggcgagataacttgacgcgtaatccagttcagaaaaaagccagacaagaagtaagataccgtaataaacactgccttttataagcctgttccaggaccaccaaccgacaagccggataatcaatccccataaaaaaatatttaataaaaggaaaagacttacagaagcaaccggatttattccctcgccatagctacccatacctacaaaaaagatattaattaacggtatagtgattaacgccgccagtaatgacaatttatataagaaggtcttaggataatctggcataaggcacccctataacatttaattgtccatacgccttcaaaccgctacagtggaccacatatcttactgattttaacagtgctcttcttaatatgtaaaaatccgatcggttataaaacgtcacgcaaccgtcagaaacaccggtgccgtctggccgcaatggatgaagacgaaagcttccacgaaaagtcccgtctacgaacgtttgatcatcaataaagccgtcctgcctgaataaagcaaaccactcattatagagattccctgtatctctctttttctgccacgtacgatacctcgaataaggtcctcctcgtggccgctcaacaatccagtatctccccaacggaatcggcccattacgcctgccggcaaattcaacggtgtttttataactccccagccctgaaaaaaccgggaaagagcctacaccggcgcagcgcaaaatcaatctgccatcagatgttttttcgttgtaattgagttcgcaagaaatcatatcgccatcctaagcataaacctgactgttccattggtccgtatactgaatattaccattcaggtatttccacgtgattttactgtatatcagggccacggattctacgggtgtggaaagaagtccttctggatgtttaaaattttgcatattaggatgaatacccgtaatcctgaccgattcgagcaccatctgcaaaaactcctcttccattccggcccggtttattcgataccagcgaataattgcctgctgaaggttttcgctggtggcaacagc

SEQ ID NO: 570 - DNA, 104 bp, Cronobacter muytjensii
acgcgtggcggtcagcctgccggtattaccatcataaggcactgccagcccatgcccaaaactctggatctctatgctgccctcacgtccagtgacctcggaac

SEQ ID NO: 571 - DNA, 128 bp, Cronobacter muytjensii
cgggcgcaggcggcataatatggcctgcgcctttatcaccagagacagtttcgggggcttttcggaacgtattgcctgccatctggatggagtaaaaaaagccgttccctgatttcttctgcgttaca

SEQ ID NO: 572 - DNA, 136 bp, Cronobacter muytjensii
ggccccccacccagccccgcgggcgcccgcgtcacgctggtgtcggggccggtcaacttatcgacgccagcgggtgtcgaacgcattgatgtggaaagcgctctggagatggaagccgccgttcagcaacgtgcag

SEQ ID NO: 573 - DNA, 104 bp, Cronobacter muytjensii
gtcccaggatataaaaccccccccccccccccccttcctctcctttttctccccccccccccgatgggccgccagatggttcgccatctccggtttctctgaca

SEQ ID NO: 574 - DNA, 239 bp, Cronobacter muytjensii
caaaggaaacccaccttccgccagtatggcaaggcgcgctttcatctcctgcgggccatccggccatgcccagattaagatatccagatcgtcaagaaccgcagacgccgcgttgcgcatcatcgcacctgccacgcgagcgcgcgcggcgcgccgccgtcgtactgctgccgatggccttcacgccgcaaaaagagctcaccctgcaatacgctgtcggcaagctcgccaccaacatg

SEQ ID NO: 575 - DNA, 146 bp, Cronobacter muytjensii
gcccgctttgcggtcatcattgatgagatagcgaagcggaaaacaacgccgcgctacacgcctgaagctgaccgtaaaccaccagcgtcggtagcccgcgcgcaaccataaaaaaagccgctgaaattcagcggctttttagtcac

SEQ ID NO: 576 - DNA, 195 bp, Cronobacter muytjensii
ttacattccgcccaatctggcgcggcgcctgtgggccgctaaagaagcgcgtcctgcggtgtgggtgagcgacggcgagcgcgatcatcccgctatcgcgctgattcaccattcagtaaaaacgccgcttgcagcatatcttgcgcgtgatgagcggcgcgtgatggcttttctgcgtgaaattaacggtgatgc

SEQ ID NO: 577 - DNA, 141 bp, Cronobacter muytjensii
cggcgcctttcagcgcatggcaaacctgaaaagggtcgccagagcgcggccttttttgtttttgtacgccgtccttctcttctgtacttccatttctcccttaattcaacgccgcccggtggattttcgtccgtttttaca

SEQ ID NO: 578 - DNA, 123 bp, Cronobacter muytjensii
atgtcgagcggtgggtgcgcttacccacctgtacgccacatccaaccgcatctcgcagggcgggtatataaaacacccccgccataacattcaatacgccagggcacccgcgttaacccgagg

SEQ ID NO: 579 - DNA, 186 bp, Cronobacter muytjensii
gctggcgcgccgcctgcgtgagcgcgtcgagggtctgtttttactctgcccgacgcttcgcgacgccagcgcgccgcaggatggcagcgcgtatgagaacaaacttcagcaactgttcagcctggtgctcggcaacccgaaaaccgcgccgtcagtcgcggtcatggccagcaaactgctggcggc

SEQ ID NO: 580 - DNA, 215 bp, Cronobacter muytjensii
tttcagtgaaccggatctaaacgcgctgggtatttatccgcacgaactacgcggcgaatgttttgcgcaaattaagccggatatcgacgcacttattcggcagcatggatttgtgctcatttccggttcggtattttatttcccgcactgcccggaataccgacagaaacatttacatcatctggtggtgttgaatggcacagatgaagtgcatg

SEQ ID NO: 581 - DNA, 150 bp, Cronobacter muytjensii
aagccgcgcgcagtctgtacagatacagggcgggtaagcgtacccgcctttatcatttatattcgtcatcgggcgcagggcggcttaacgctgcacacttgcctcgcgcgcgtcatcatcgccgttaacccgcgcttcctttctctttaa

SEQ ID NO: 582 - DNA, 339 bp, Cronobacter muytjensii
ggaatttatatatcatcccctaataagattactatcaagagcgatacagaagttaatgtggactctccgtatttatcaagtaatgcgcatttacatcaggagacataaaggtttttagccctttcctttactttatttaattcgggggttaacttaactaactttggatacagtattgctgaatatagtaacaaaaaatttgacttaactaacagtgatgttaggacagaacttatctctggggcaaaaatcatgatgcatggtataatgttacatgctgcaaaattatctacctttttataattattaacaaggaataagaatggctattactgaaca

SEQ ID NO: 583 - DNA, 249 bp, Cronobacter muytjensii
aaataattccccattctcgcatgatatattactgctttaaccaattttagttaatcgaaggattatgaatactttatcttatattatgcctaagcttgcatggattattcctttatttgttttgatattcgttgcatatgtttttattaaaaatagagagtcagataaacttgataattatataaaggaaaacggtgtcgatgttgaggcgactatgacagtgatcaagcccgacgctgcgcaaacaat

SEQ ID NO: 584 - DNA, 196 bp, Cronobacter muytjensii
acctggcgctatttatttggtggctgggtaacatacaattatatgactcagtaaggtgaggattgaaatgtatacgcagataaatattttagtacaatagaatgttcaaaaaaatagctctatacatgtcaacgcagataatttgagttgcgaaaggctatcaacgcactatgattaaggatgaaaattaagaccc

SEQ ID NO: 585 - DNA, 878 bp, Cronobacter muytjensii
tgaactggcgatgcaactatcagtgtgcctggtaaaataacaataaaaagcgactctgaagtcaatgtcgatataccatgggcaatagagttcaaatggaatacgactggagttgcggcagccaatttttcctttgctggtcttgctgtaaggctaacaacagctaacattggcctaactgcatcaaaactagcaaataatgtcgttgttattacttataataatggtcttgaatttaaagttggcagcacgtcatatgcccgatacttggtaactttgagaagcgcagtactaactgcgtttaattgaggtttataatggtaacttttttgaaatctttacattttatagttccagtgctttttgttggcctgttagcttttatggttattaaatcaaaccgaatagatagagaggaaaaggaaatattaaaagatcccgtgtatcaggatgccgaagtcatagggggcgtgccaggtactcccagcccgaaaggaatagtaaatttaagactgacatataaatatactgcacacactggcgaggtaataataaaagaaaatgtgttaactgcggttaaaacgatggatatgcaaaaatttaatgttggaagcattattcctattatttaccagagagacaatcctcataagagcatgctgaagaaagtaaatataatagatgtctaatatgcgcgaattgaaaatcattagttacttattttgagcaggctatggctgtagattttattaaatatatggtagtctattttctttctcatcatctacagccataaaaacagaagcgctcattttttttgggcgcaccttaagaaagatagtttaaatgtttacagcagattatttaggtttattggc

SEQ ID NO: 586 - DNA, 567 bp, Cronobacter muytjensii
cccctctcttaaaataaaataattctttactgtaaattatggttgatgctctgtaccatcaggacaagaaatgtcataactttttaattgagacgatgagacaggtgcgctcagttaaatcacaagagttaatatgtcaaatgaaattattgtcgcgatactgttgattgggattgctatttatactgttggaaagtccttttatgataatgaatcgatagaaaaaaaaggaacgactgttacggcagtggttttaagatctgtacagctaagcagtaatgagaccggtagtataaacggtgattttatcgtgaaatttgatactgctgatatggaagagaaaacaatcaggttcaaatctacaattccgcaactttatgcctctcgtgtccggcccgggtgcgaggttcaggtaagatatttagataaaggtaataagataaaagcttatttcatttttgaatgattaattattaagtttagggctggctcggttaaaactctggattttatatgacagcggaagttatcgtcgcgatactgatagtagttttttttgtgtacacg

SEQ ID NO: 587 - DNA, 123 bp, Cronobacter muytjensii
ttaaaatgcggtttaacaggggaggaagtgggtgatgcttcaaacctgccagtaataaagcccggaacaaaagaatggaagcaggcggttgatacgatcaaaaataatggtagcatccagaag

SEQ ID NO: 588 - DNA, 648 bp, Cronobacter muytjensii
gacgaatgctcataaatattctcaaaaaatattgagaggatgaaagaagggctggcaccaaaaatgagggttgaagtaattgatcgtaaaacaggaatgacaaagataaaggatgtttctatggagattcatcatcgtactttacctcaaaggttaaaaacgcctaaagtaaacgaaccatggaatttggagaaagctgctccttgggcacatgaggctatggatccctataggcatactggttatgatttagtgaggattataaaaggaccaaattcatggtgacaacaagcgatgtaaaaaaaattataagttcggatgcttatatggacttattaagtcaaactgtctcatcatcaaatattgttataaataaatctgatcctcctagccaagtgcttaacttagaggccggtcgcataaaccattctggtattgaaataattgaccttgaatctacaatcttaagcgactctgtagatattgctcggttttcggttcttaaactaacatgcttaaccgatggcgatattgatgattataatgaggatggtgacgaggatttggtaattgaaactttaccattttataaaagttttttgattggatatgtgctggagtattattttttgaaaaacaacccccgct

SEQ ID NO: 589 - DNA, 111 bp, Cronobacter muytjensii
agaacagggttttttgattggatatgtgctggagtattattttttgaaaaactttggcaaagatagatggaggaaatatttatttgtacgaccaaccacgcatttacttgg

SEQ ID NO: 590 - DNA, 288 bp, Cronobacter muytjensii
gctttgtttacatacgcaatgaaagacgccaaacgcgcattacaaacctccttgggtgacgatataaataatatcgttttttatattactattccgggggagccagagattgattatcacgcggccaaatttattaattctccctctgaaaatctttacagatttttggacgcgtatagaggttttctgtagacgtttctgatttttatgtaaaggagtcggaatatcatgctttaagctctcccacttaacacctttaacggctttcgctactaacttcgccgcctg

SEQ ID NO: 591 - DNA, 111 bp, Cronobacter muytjensii
gcgggcgcgcgtgccagcggtatcgattcggcgtaatgcgtgcgcataaaacccctcaacacccattgccacacgccgcagacgtatccgtctcaccgctccaaaacgcgc

SEQ ID NO: 592 - DNA, 1320 bp, Cronobacter muytjensii
aaagcggtttcccatgaaagtggttcgagtaatattgtttatcgtgctttaactgagcaggacgcagctaggttggctgctgggaaatcgatacagggtaaagcattggacggaacatggagtgctgcagaacatgttgctaaccagcctttatctgacgcctccagtgctattggtggtgccgctaaaaatagcccatggatctctacaacgaaggatttggacatagctagggcatacgacagtggacatggtatagttgcaatagatctaaataaagtcacttctttaaatgtagaagtttggcaacatgctcctagagttggtggggttgaaggccttgcttatcatcgttcaatttgggctcaagaagtaacaattttcaaggatattccgaactcggcaattacggggattataaaatgaatttgaataaagctaatattttagatgttcttaaagaaaaggttactcattctgtttatccattaaaaatgggagggcacatcaaatctgaggcttttaatgatttaatattagttgcggaagaagcaacgagattattcagggatgaagagttagtcccgaaaaaattattgtcagaattgcatcttgttgcgatagggattgatcttgaaaatgagttctacaaaaatgaagaactatctttaatctctaaaagaataatgaaatgcttcaatttgatactggccggaaagtccgttgatgataaagagccaagtggtccaaggattatttaatatgattgaaagggtttatttttatagggtaaatgagccatatggtgctttttcaaacttccatagcacaggatttgatgtcgatggaatatggtggcctacagcagagcattattttcaggcgcaaaaatttcatgatgcaaaactaaaagaaaaaattcgttcattatcatctcccatggaggcagctaaggccggaagaaatatagattatcctttgcgagatgattgggagttaataaaggacgatattatgcgctttgctgtcctgggaaagttttctcagaacattgacgccaggaggctattgttgtcgactgggaacgcggagttaatagaacacactaagaatgatcgatattgggcagatggtggtgatgggactggaaagaatatgctaggtaaaatattaatggaaacacgggctttttttagtaaaaaggatttgtgaggtcgctcgaagtatttttttcaagcagcccgttctgtgggggtaatgcctgaacatattgatataaaattattttacctcatatgagcgagtgagctattaatcttc

SEQ ID NO: 593 - DNA, 126 bp, Cronobacter muytjensii
ggtgcaaatttgtgaggcagatccctccgtgcgcaaaaaaatcaggccgcaggccgcttgccgctaaaatcaggaagcagcgactgtcgtcggtaggttctatatgcttgatattttgttaaatat

SEQ ID NO: 594 - DNA, 143 bp, Cronobacter muytjensii
aacccttcttaatgctccggggcctgcgcgtgcgttgccgcgcgccatcgccagaggcccacagcgcgtgatttcagccctggcttcggaacgcttaatcgtgatgttgtttcagggagaagtgaagtagcccgccctgaaag

SEQ ID NO: 595 - DNA, 117 bp, Cronobacter muytjensii
agcggatgaataacggcgggcgcgctgcgcttacccgccttacatgggtgaggcagaacagggcgggtaagcgtcagcgcgcccgccatctcaacactcttccattcacacaacccc

SEQ ID NO: 596 - DNA, 105 bp, Cronobacter muytjensii
agcgggcgcgcgtcttacccgccctgcagtatcggcgacatcaggtcgtgttttcagcaaggcaggtaagcgcgtccgctatcaaacgctctttcagcggcgaag

SEQ ID NO: 597 - DNA, 159 bp, Cronobacter muytjensii
caggcaaatttcagagagcgtaaaaacgtgccggaaggtgcctcgcaaagacgcaacgtgtcggggttttcatgattggcaccgcgttatacttcactgcgttactgtattcgcgccgatgagcaacgcgacgggctggcatgccaacccgtgataaat

SEQ ID NO: 598 - DNA, 114 bp, Cronobacter muytjensii
actcgcgttgaatgccttttactggcagggcgggtaagcgaaacgcacccgccattaaccgcacccgccataaaatgtcgtccgcaacatccttccgcaccgctgtacaatctt

SEQ ID NO: 599 - DNA, 101 bp, Cronobacter muytjensii
aaattcaatgcgtccgttaacttgtacaaagcaagcggatcctgtacgggttattttaacttaagcgaaatcagagcgttttatcactttctttcgggacg

SEQ ID NO: 600 - DNA, 183 bp, Cronobacter muytjensii
tcatcgtggtaacacgaataaacgcaacgactgtagtgttttaacgcgtaatattccgggtaaggttatgcctggctgtttcctggagacgcatccggcaacggcgggttattttaacgaaatgaaagcgcgctattttcggtgagtacctgcgaaacgtccgatataacctcacggtcacta

SEQ ID NO: 601 - DNA, 216 bp, Cronobacter muytjensii
aacaatgtgtagtgatacgcgctgtgaaggagagtaaaagtagtcgaatgggctgcggcacgcgcggttaaaaggggttcatcggcggttgtggttaaggcgactggcgtggcgggggcgcttcgcttacatgtcctgtgaagcggcacaatatttatgaggtggataagcatagcgtacccacctcatcgcgttgagcgcgccccgccacggcgc

SEQ ID NO: 602 - DNA, 190 bp, Cronobacter muytjensii
cgagggcaggtggcgttaacgcctacccgccctgcgcccggtaagacatcccgtagcgggtaggcaacgcgcacctgccacgggaagcagcgcattatttacaggcggggtaagcaacgcgcacccgccacggaaagcagcacattatttacagggcgggtaagcgaagcgcgcccgctacagaaagaaa

SEQ ID NO: 603 - DNA, 148 bp, Cronobacter muytjensii
taatacgatgacggtactcggctccattctgggcgcggcagcgctgggcgccggggcgggagccggtggcggtggcggtggcggcggtgatgaagatgatggcgacgatgggggtggaaacagcggcagcaacggcaccattacgctt

SEQ ID NO: 604 - DNA, 162 bp, Cronobacter muytjensii
aactcttaatggcaaaacctataccgccacagtaagcgcggaccacagctggtctttgaccattccagccgccgatgtgcaaaactttccggacggcccgctgcaagtccgcgtgaccaccaccgacaccgccgggcgtgaaatcagcgccgggtcgacgtt

SEQ ID NO: 605 - DNA, 108 bp, Cronobacter muytjensii
gcgcttcgcgtacccgtcctggcatcgtgatacccgtttttcgtagggagtaagcgcagcgcacccgccatgtactcatctccacacgcaaaaaaacgcccggtttac

SEQ ID NO: 606 - DNA, 124 bp, Cronobacter muytjensii
ctcatgattgtataaaccttatccgcatcttaacgttctctctcaaaatcgcgggtagaggaaagaggtgaagcgtatcgcgggtgaattttaaccgcatcccccgcatcctttttcttcaatg

SEQ ID NO: 607 - DNA, 155 bp, Cronobacter muytjensii
cacttttgcattgttaagcgctgccgcatcggcggggatcggttttcatcagttcacactcaatgaaccagccactcgttcgctggacgttgcggtctggtatccgacgtttgataaccgcgctctggagacggtgggcgagaacgttgtctttt

SEQ ID NO: 608 - DNA, 106 bp, Cronobacter muytjensii
aaccgtgctccctgaactggacagaagggcgcaggcgcggcttgccgaacgccagcgtcacgctaccgcgcgcgcgcgcgcgcgcgcgcgccgatataattatcgg

SEQ ID NO: 609 - DNA, 219 bp, Cronobacter muytjensii
agcgcacgctgtaattcagggttaatgtgaaggaattatggagaatgaagattatctacatcatgacaggatcaaacgatgcggaataagaatctaatgcccgtaatgggttacgtgaattgttatgattacgacgcatggcgaatgagataaacgctgtaaaataaaggcgggtatcattcccagtaaagagagcgagcgcaacacctgggtgctcaa

SEQ ID NO: 610 - DNA, 125 bp, Cronobacter muytjensii
taaggaaatacatttcccgaatctattttatttattaaatcattccttgaatctatatataaaaatcacaggccaacaaaaataagctgtgataaaaaccccggagaataatattaattgaatcc

SEQ ID NO: 611 - DNA, 115 bp, Cronobacter muytjensii
ccggataataacaaccagtcggtattactggcgcaataaacgtgagtgtcgccagcggcgtgggagcgctgctggcgtaacggtcagaccggctcgcgtttttccgctacgggcg

SEQ ID NO: 612 - DNA, 131 bp, Cronobacter muytjensii
tttgtttagaaatcattcggttaattgaatttgataatttgtgcggtttttaagccgaaccacgaggggcatcgtaaaaaaaccggcggattacgctgcaggcgtaataaaaggaagaagaaaagcggggt

SEQ ID NO: 613 - DNA, 100 bp, Cronobacter muytjensii
cggggagtcgtctgcacccgcctcggtgttcatcacgataaggctgccggtatcgccagtgtaattgccatcaatagtaaacgcgttaccaacgctgtcc

SEQ ID NO: 614 - DNA, 194 bp, Cronobacter muytjensii
gcaggccgtttatttattgattctgtaaatgaacggcgtcaggtcaggggcgtggcaaagcggctaaaataaaggttatccggtaaagagtgaaaaatagtacgaggggagaaatattttgtctggtgaatagtctcttttcggaaacaaaaaaagattgatttattaatagtggaaataaaaaaaaaaaaaaa

SEQ ID NO: 615 - DNA, 329 bp, Cronobacter muytjensii
ccccccactgagtacgccccgacagcctcttacaactattgcggccgcatgccgtagagcggccgacacgtctcggaattttcaggaaatgaagtcgtggaactactgcagttctgcgagtaagaaggccaccgccagggcttgaatgatgccctctgtgaccgtgtagggcagcgtgaacattcaccatttcaccccgcgttcatgggaggctaccccgaacaggcctgtcatgatgcctgctggacaggcgttcaacagaacgaagacacaacgcctgaggcaattaacgcagagattcaggagacgttggccaaccgtgacaccag

SEQ ID NO: 616 - DNA, 120 bp, Cronobacter muytjensii
cagagcgttaagcctgccggaaatcgctgagagtcagcggcttcctgcaggcttttttattggctggcacatgaacgtcatactgtgacgagcgcagaacaaccggggcgagaccccggc

SEQ ID NO: 617 - DNA, 150 bp, Cronobacter muytjensii
ctgcctgcgccagaggcgatccctgaccgatcgtgtcgtgacgcagggatcgaggcattaaaagaaggccagaaagaataaggttatctggaaagcaaacgggctacagacatgcaaaacgcgcgaataagcgcagaaactttccgcgcc

SEQ ID NO: 618 - DNA, 117 bp, Cronobacter muytjensii
gtactgcatctccctgaacatccagcgccatctcatcagcgggccaaatgatattctgcccgcgttgttccgccagttcgtccagctcgctgcgcagcggggcaagaatatcctcac

SEQ ID NO: 619 - DNA, 101 bp, Cronobacter muytjensii
accggccgtcgtcgcttcagcgatgcataagcaccgttaatctgataaaaagccccgacacgttcggggctttttttatgggtgcgattttataaaatgca

SEQ ID NO: 620 - DNA, 119 bp, Cronobacter muytjensii
tgccaacgatatataatctgggttaactattcagtctctgtattcgcgcgccctctgtaacgtcgcgacaatcaacgtgctgcgccaggaaatactggctgattaatacgctgttgtac

SEQ ID NO: 621 - DNA, 173 bp, Cronobacter muytjensii
ttgtaatttttggcccgaatgtgacggggcgggtgcggtgcgctgatccgcccgacacggtctgttttgccttgacgcacgtatacgcagggtgcgtaaacgccgcgccagtcgccctgtgagaaaagtgtgaaggtgtggcagaaaccctctccccgtggggagagggtcag

SEQ ID NO: 622 - DNA, 409 bp, Cronobacter muytjensii
tagtgggggtatcattgactttgaccattccgataaagaaggggaactggccatcacttaaggggatatttctgttgattttaaaccgaacgccctcgatcgtatacagaccaacggcgataccttttgcggcggtgtcatcactggctgtattggcaagaacggtgctgtcattgctgtctgcaacgccgctaaactggatcgccgtacgcgcgtagtaattcttgatattggtgtaatctttgcagcctgcgccagtaatggaggctaccaccaggacggacgacgtcgtgtttattgggctggttgcgactttaggtatccttccaattgcctgggtctttaaatcgaccgcagggcggctcagggaaacggtacaactaaagggccgatgcactaatccgttgac

SEQ ID NO: 623 - DNA, 221 bp, Cronobacter muytjensii
agatcgtgtccggcatgagaggctattttcatgcgcggcgcacaggacgttatgcttttgatgcgaagagccggtaaacgaggggaaaatcggaaactgacagggtaaagatacttttgtggacgcgaatctgctggcgtggatggcgcccggtatgttagcagacggcaggataattttcgtcagaccgggagaattacgctgcggcaaataaggggggg

SEQ ID NO: 624 - DNA, 234 bp, Cronobacter muytjensii
tgacgcaggcgtcgcaggcgggttcgagccgcattgcaccagaatggggctacggcgcgctgtcatcgcgcatccgcggggcggatatttcacccgatgcgtttctttatataattccttgaaatcaggtcgccccggaactatcgcgctatttactgatttatcgccaggcggcttttagcgtcatttattatgctctgacgctttcggataacgccggcgattttggattga

SEQ ID NO: 625 - DNA, 145 bp, Cronobacter muytjensii
agtaaggggtttccacggggtaagcgccagaagtcaaccaggcgggggcgcgtgcgcttacccgccgtcattatagtgcgttccggtttgtcgttttgcagaagggtaagcgcgtcgcatccaccattgggctatcgcgggtgcg

SEQ ID NO: 626 - DNA, 106 bp, Cronobacter muytjensii
cgtggtctttcacgttgcctcgttgttggctgcctgggaatggcggcgggcgcgccgcgctgactcgccctgcggacagttcggccgggtaagccccggcctttaa

SEQ ID NO: 627 - DNA, 179 bp, Cronobacter muytjensii
catagcgatgctgcaggggggaagcgcacccacctttataattattcacgtctgatggcgggggcgcttgcgcttacccgccctgtaaagccctgaacccaccgcgccacctcatgctctgatgtagtgtgggtgagccttgcgcgcccaccacgccacttgactacaccacgtacctc

SEQ ID NO: 628 - DNA, 492 bp, Cronobacter muytjensii
caatggcgtacctgagaaaaggagaaccgcgccatgagtgagccgctttctaccttgcacgagacgctctcgcagttctttgacgcgtttgcgcgggttcgcacggttgaaccttctccccgcgctcgcaaggaaactgcgccgtatgattccgcggcgctcatctcatttatggatagcctggcgcaggcgttcgacacccataaggccagcgctccgcttttcgacccatgggccgtggcggggctttctcgcaaggaagtcgcgaatacgcaggtgctggcctggctgctggatcccaaaggcagccatggtttcggcgcgctggcgcttcaggcgttactggcccatgtcctgccggtagaatttcatacctgtcgtgtaaaagccgaagcgctccccgatggcaacagcagcgaacgggtggatatcgtgattgatgccgataccttttatctgctcattgaagccaaaatcgatgccggtgaacag

SEQ ID NO: 629 - DNA, 1032 bp, Cronobacter muytjensii
tcgtgattgatgccgataccttttatctgctcattgaagccaaaatcgatgccggtgaacagcccagggcttcagccattttgtttctgacgcctgacggcaggccacctcgcacctgctcctccagcgacaatacacgctgtatcagctggaagaccctggctcgcgtgctggagcatggtctgcgcccgcacttcagggagccagttgagaaaccgcccacacgccatatggctgaacaggcggcacgccgctttcttcatcatatccgccagttttaatgttaatgaggcccatgatatgcaggatacacaacgagacgctggcgcgctgattttctcccggctcgcgatgttcaacgaggcagtaacgctgtttgaaacgcagctcgacccggctttctggacaggtttttcgcagtgtctggaaactttcgcagaagcgacgggttggcagggggagtttgatctgcagaagcggggcagttgctggatgacctgggctatggaagaagaacccgttcgtgcctggtttgacgttgggccggttgaggatagtggcaacgattactatctcgctttattaacggatgatggcgtgagccgtagcccttatgggtttcgttttgttcctgattaccgacgctttggcggccagagagcggtgaatgaaaagctacgcactgcccagcaggcgttgcttaacgcactggatgagctcggttttcgtaaaaatagccgtggcgttttatttctgcctgtcacgctggatgcgcagttgctggcgcaaacctggcagaagtatggcgaatttgcgccagacgatgaggtctttacgccgttgcgtagcgcgctggagacgcttaaacaggcggtaccgtggtttgatcaactactggcgtcgataagcgcaaagtaacacacctgcagttgctgggggcggtaagcgcaggcatcaccatttaaaacccgttaccccatgcgacaaaccataaaaaaaggcgcccgtggcgcctttgcttttactcttaac

SEQ ID NO: 630 - DNA, 143 bp, Cronobacter muytjensii
ttaagcatcatcgcctggggcggcgcgcgtttttttatctcccgcccgtggtgcagggcgcgacactctgcacaattacggggcgtatggctcccgtttcccgccgaaatatatgcatgctgcacaccgttttgtagccgttc

SEQ ID NO: 631 - DNA, 213 bp, Cronobacter muytjensii
catcctgtattattatattgcttatagtttactaatggtaatcgattaatatatcactgtttttattcgtgacgcggaaataagcgaagcggtaaattcccttttacgcgacaacgttattatctgcgcgctgttttaacgccatgaatcgacagaatcgatagaaaaataatatgacgcaggtcacttttttaaattttctgcgctttttat

SEQ ID NO: 632 - DNA, 147 bp, Cronobacter muytjensii
agccgttgccgcacccggggctttccttcggggcggcgcgcaaaccagagttttccgtttcgtaaacccgctggttttccgcctatactccgtgctttggcagcatatattttctggcacactggcttttcaacaacagaagggcgc

SEQ ID NO: 633 - DNA, 132 bp, Cronobacter muytjensii
tgcgtcgtgaaacgcagccgtggggacagatcaagcttgctgcatttttcattgcgcttattaattatccatatatagataaataaaaaagacgtcgcgcggtgcgataaagcttatttattatgtaaagcc

SEQ ID NO: 634 - DNA, 139 bp, Cronobacter muytjensii
agaaggggctggagggcgggtgtaccgcgcctacctgccctacggctattcgcaagcgcgcatacatacagggcgggtaaaccacgcgtcgcgcaatgcgagagggtaaacgcgccgcgcttaccctccctgtgtctta

SEQ ID NO: 635 - DNA, 100 bp, Cronobacter muytjensii
atgatgatgtaaggcttcttgtggatattttcggcggttaagtaaataaaaagagagaaacaaaagccaggaaaaataaaatccaaaaaagtaaaaccgc

SEQ ID NO: 636 - DNA, 150 bp, Cronobacter muytjensii
actacggcaaataataaatgagcttagattaactcggtttatatacacgcgagcaacagcacgcgtgcgctgcttttttacggcagcggaagcgcgcctcgccacggctatgggtataccccacggcggtagcctgttcgcagcattctt

SEQ ID NO: 637 - DNA, 216 bp, Cronobacter muytjensii
gcgtgcgctgaaccctcactttatgcagacggactttgctaaaagctggtatggcgtgcttcactctccgctattaaaaaaatatgccgagaaatatgatttccgcgtcgccttttttccacacgctaacattcagccttatttatctgagtttgcggtgccggattatatagaagtgatcactcatgcgcatggttccattcaggcgctcttcaa

SEQ ID NO: 638 - DNA, 253 bp, Cronobacter muytjensii
gatgtacatccactgtagcgagtaaccaccgtcagttatacctctgtggccgccatagataagacgctgtatttaaacgtttttccttcagtgtgcatttttttatccttgcacattcacatcgttattcacagcggctgccagcgatttcggcgcttaaacgcctcatactttatcagaattgcactgaacgtacgctctcaggctatccactgcagtgagccgtccttcaatggcggctacagatcgttaa

SEQ ID NO: 639 - DNA, 485 bp, Cronobacter muytjensii
ttcaggtatggggttttacctgatcactctctacagtggattctgctcaccatagtggatgttacttactacagtggttatctccgggggctgactcactacagtggatagatccttacatccgctatgccgattttatggtgcacccgacaggatctggcgatttcaccgtgaaatcctgatgcttaatccctatattacagcgacttaatggagaaacatcctggcgaggcgcaggctcctgctggcgtagtcgcatcaccagcagttcacttttgcagagttctccgcatacctgtcagagacggttgcagtcgagtagtgaaaagcagcgaaacaacgcaacgttcagagcgcattaaaagtccatttcgctatttatccgtttattaacgccaattagccttattttattccggcgatgattttcggtttacctcatgtcttgacgttatttttcccttaatgaaattccccggaaccgt

SEQ ID NO: 640 - DNA, 554 bp, Cronobacter muytjensii
atcgaaaatgaaaccactcaacctggcaacgcttataacttaggccaatctgatattttaattcctaaagaggagttacctacaggaagttatggttattactctttaacagaaaaagtacaaagcggatactgtagtcaaaatggcccatgtaattattcaacagtaaccaactactatcttgcacccttcagagaagaagctgtacagaaatttgcatggacaaaacatactgttaaagttgcaagtaaaggcggagctgcaaatatttcagctgcgcataacatgatgattaatgcgggagtgcttgaaaacttagcaagtaatttttattcaaaaaataacatttcccttaaaggaaatactgtaaaaaatcagagtgttgaatcaggtgttactaccgattacttgatttatacatataatcctgagcgtgtcagaagaaatcactatgctaattcaaaaataaaagatgttaattatgtagaaaaaaaacgaattcataatgatgcactgccttttaaactaaccggccatgaacaagagcatattaa

SEQ ID NO: 641 - DNA, 200 bp, Cronobacter muytjensii
gtgctttctggcgtgcaggcgaatcaggcatcgcggcttgctgaggcatcccatgacaaaagtggggggatcgcggtcagcgtgtcactcacggcgcagaaatccagctcaaaacaacagcaggagacatcgctggcaaacggttcgaccctgagcgccaccaataacctcgccgtcgtggcgacgggtaaaggcgacag

SEQ ID NO: 642 - DNA, 1435 bp, Cronobacter muytjensii
atttagcgggaagaagcgagaaagaatataaagataaggttcaaaaacaagccgatggcgtcgatttgcaaaaaatctacgggggcgacgaagaaaaaattgaagcttatcgcaaaggacgtgctcaaggagcaaccgaaggtttgaaagagggggctgttgaagcggtagaaggggcggtcaatactattctgcatcctgtagatacagttacggatttggcttctactatatggaattacgaaaaaacttatgatgctatcaaaatatctgttacagagtggaacgatttactggactatgcgttagttaatgatcctgagttagcaggtgaaatggtcggttccacacaagggaaaattactggtaatacaggcgcgagtttcgtactttcaggtgcggcagctaaattggttcaaaaagctgcccgaatggaaagcaatgtgagattattgccggatatacatggcaaagagcatcctacatatgttaaaggtgacgttactattccagtcagcaaggttgaagtctggcttcgtgggggggctaaaggtgatatggacgtattggtctcacgtttgaaggcattaaaagatgaacaaatcgccgatcagcgcgcctttgcgaaatctggcaaggaggcggaaattaaaaccattctaaaaaatattaataatatagaaaggtcgagagtgatggctgataatcttatcaaagcaggctttgaaaatactgggctgaataacagcattcttatggaaaaactggtgagatcagcgaaagatgtggacgctgagaatccaaaaagtactttcgttataaaaggttcagatttatcagttaggattaatgcaatctgggcagtgttgccggacggtactaaaagacttgcaaccttaacgacaggcactttcaaagagtaaccataatgatcaaagataaactgattgtgggtttagatacttacattaagcatcaatattttgatatgggttcttttggtgagccactggaagaggtggcggccgcccttttagagttgtcatctttggatccaaaactctgtcttgcttatagtaaaaggatacttacagataaaaatttaggtgatccttatcttgatagtatttgtctacaccatctttttgatttagaaccggaatttgcagtcaattatgtgaaggaccatttgtccattgtgcatgctgctgtattgtcagaggcaatgtatgggctttgcctctatagtaaaatctctttaaaagaagcgttgtctaacgatttgattcataaaatatatattcgttatgatgaattggcgaaagatgattttgcaaaagaagtcatggccattgattttggttatttcaacaaagattttcctcgtattaggtattgaggcccgtaaacagtataaaatgataacttttaaaaa

SEQ ID NO: 643 - DNA, 311 bp, Cronobacter muytjensii
aagaatgcggttgagaataacttcctgaagaacaacgagccggaaacgttcgcgaagaaactggccgattgcggctatgatggtggttgccgggccgacgtcatgaaggagatggtcgaaacttctaataagaatatcgacgagttcagcgattgtatgaaggccggaaataaagcctgtgtcgacaatcagttgaatgatatagcaaacgcgacgggatttgatgcgctgacggcggaaatcggtacagatgccgttaacgcctataaagatggtatgggcgttgaggcatttaacaacgcgatagactg

SEQ ID NO: 644 - DNA, 965 bp, Cronobacter muytjensii
taagaaaggctggaagctggtcgagtcgggttcgggggtattaattatcgccggaggtcagacgataggcggtaagctggccgaggcgattgcgggaagtaaaggaccgacagctaacgggtataagatctctaatggtgctgataaggctatttctaaagctgacctggagcatccaattgttcaatctcggattaatgtccagcatagtaatgctagagaaggttgggagcatgttgtaaacgtcatttctctggtaaagagaatgcaagtcaatttactctcagtcagactgaagtgaaaagtattcttcaaagttctgatgtggctaaaataccaatcagcaatactcacagatcaattaataaagcgactggtcagcaagaaacactttatgagcgtgttattatttttgataaggatattggtattgataaattcagtgggggtaagccgacaaatactatgacgatcttaaccgataaaaaaggtaatttgataacggccactccgggaaggatgtaatatggaaacagataagtcagtgggtgaaatgttgtctgattttaataaattagaggcattttacatcattccgtttttaaaaaaagagtttggtgtggttgattcggcttgttttttatatcaaacaatagatcagggtgtggatatttatgcttatctcgttaacggtaagcatgttattgagttcgacttgtcaaaaatagataacacaatagttaaaaatgaaattatttcagtagaagagtatatgaaaacgatacagggaaaaggcaaggctaaaaagaatgcccgtgatgtattaaaagatgctattgataagtctaagattattgattagttgggagagtcccggcctgaactggccgggatcttgctatcagtcatcaggcaaaacgtccatctccgcgcttaatcagcggcacattgccggtatcgttcag

SEQ ID NO: 645 - DNA, 967 bp, Cronobacter muytjensii
aatcagaggtggtaaaatatattctgcagataatgcatcaggacattttaagccgggggctggttctataggggtaagctggccgaggcgattgcgggaagtaaaggaccgacagctaacgggtataagatctctaatggtgctgataaggctatttctaaagctgacctggagcatccaattgttcaatctcggattaatgtccagcatagtaatgctagagaaggttgggagcatgttgtaaacgtcatttctctggtaaagagaatgcaagtcaatttactctcagtcagactgaagtgaaaagtattcttcaaagttctgatgtggctaaaataccaatcagcaatactcacagatcaattaataaagcgactggtcagcaagaaacactttatgagcgtgttattatttttgataaggatattggtattgataaattcagtgggggtaagccgacaaatactatgacgatcttaaccgataaaaaaggtaatttgataacggccactccgggaaggatgtaatatggaaacagataagtcagtgggtgaaatgttgtctgattttaataaattagaggcattttacatcattccgtttttaaaaaaagagtttggtgtggttgattcggcttgttttttatatcaaacaatagatcagggtgtggatatttatgcttatctcgttaacggtaagcatgttattgagttcgacttgtcaaaaatagataacacaatagttaaaaatgaaattatttcagtagaagagtatatgaaaacgatacagggaaaaggcaaggctaaaaagaatgcccgtgatgtattaaaagatgctattgataagtctaagattattgattagttgggagagtcccggcctgaactggccgggatcttgctatcagtcatcaggcaaaacgtccatctccgcgcttaatcagcggcacattgccggtatcgttcag

SEQ ID NO: 646 - DNA, 669 bp, Cronobacter muytjensii
aatcagaggtggtaaaatatattctgcagataatgcatcaggacattttaagccgggggctggttctataggtgttgcaaaagatgcatttagtaaaatacccagccaatactttagtgaagactttcagggatataaaccctatgacaaaaattgaatataaaggaacaaacgggctgtatccttggtttcctgaacatggtgagcagcgtattaaccctgaatacattgatgttgttaagaggttgtcgccgtatggaaaggttttttcttgtacggcggagaaagccccatatataacattagaatatggagatattgtttttgaagtaaagcctgagttatatgaaataattagccctgttttattccgtgttggtcatagggtgaatatcgttggctcagcatcgaacaaatttggtgttgttgttgggattgattggcatagcaagaatcttgagccaatatattatttggctatagatgggaagaaatcatcacgccgctattttgagtcagagttgagagctgtttaaatcgattatgatgtaaatgtagatcagttagcctcttaattacttgtaagatcccggcctgattgccgggatcgtattatcagccatcaagcaaaacgtccatctccgcgcttaatcaccaacccatcgccgg

SEQ ID NO: 647 - DNA, 649 bp, Cronobacter muytjensii
gggtgttcagaccgctgcgcaggccgggaagaatgcggttgagaataattcgttgagcttggtgttacggggcggcaagctggctgttgagggctgtgccaaaatggctgcatgccgtaatgcgctgattgaaaaagggctgggagccctgcttggtataggtgcgtctaagacggtgctggatagcctgtctttagaagatcagcaatatattcttgcggtggcagtatctggtcaggccaacctgattgaaaaactaacgccggaacagcgagcagcttatgattatcttgttgaacaggataaacagggaccattctcgttattgcctcctcaacaaagtgcttcagatgacaagccttcctcagcgcctaatcttggtaataaactgacggatgagcataagaaagaactgggcggaaccggagcagggactccaggtggttgggagccgcaagacgaggagaatgcccggaataatgaacgtcagacaatcaccgtggaagatctgacgtcgacatcctcaaaagggcatgaaaccacagggcgttcgaagctttttaatcgaactgggggaatgaattcagcaaataatgaatttgatgctttatcacccagtgagattaaaagtattcctggtggtagggtt

SEQ ID NO: 648 - DNA, 148 bp, Cronobacter muytjensii
ggagtggggcctcttataaaatcacataaaattaaaagaattggaatggagaggccgttgggcaaggggacgaaacaagtgaaacaaaacaaaacaaggtggaaattgatgtcaacaaaaaagaaatcaagttacagctggttatcag

SEQ ID NO: 649 - DNA, 792 bp, Cronobacter muytjensii
cttactcgcaatgatattacaggtttcctcgaaaagtacgcgaaggcaaagacagaggaagaaaaaaaacagcttctgagcgacttaaaagaattagatgcatcacagcaacacgcaattctagcgtggagtattacgattaaggatcaaaaagaagaacttcaaaatttaaaaactctacaagcatcttcacaatgtgattcacagtgtcaaaaactggttgcatactcgattagtgaactcgaacccgtcataaatgacaaaaatttatatcgagacgccaaaagagaggctttgctgtttagtattattcaggaacttcagatgggtggatttctaccaaagagtagtaaagctccacaatctgctgtttctgtgagtaatacaggtaagacgacaattgatagtgtcgttaaaagtgggagcaagcgagcaaaagtattgcaagaagcgaagcagaattactgagtgacactagtaagcaattagaaaaatatgttaatgcatttgctaacagtaagtataaaccagcgacagctataggcgcacttgatcctcttacaggaaagatcgtgacaacatcgaatggatctgtacccactataattgcaccagaactgcaggcgtatgcagatcgcttgggtggtctgggcgtaaaaacagcttgtggaaataccctaggccgctgcgcagagtttagagcagcaaatgaacttttgttggcaaatccaagtctaaaagttaaagatatccagtttactcctgcgattcggccaagaactggagaagtgg

SEQ ID NO: 650 - DNA, 163 bp, Cronobacter muytjensii
ccgcttccgttataacgcagaaacgccgggccggcgactcaccgttcgggtagggatggcggtggtaaccagcagggcgcatcgccactcatgacggcagaccgtgatttgctggttaaatgctctgcgggttggttcttatacagtgttatccgctgcgtca

SEQ ID NO: 651 - DNA, 157 bp, Cronobacter muytjensii
tttttgatacatcgcctgatatttttctgcgtcacatttttgccagcctgtcagacgaccgacgaaatctttaaactgcatcatgccgtacctgtaataaattgcgctgaaccgccagtaaataaacccgaaagcattattgcctgcgaaatgaagg

SEQ ID NO: 652 - DNA, 139 bp, Cronobacter muytjensii
taacgatgcgctttgctatccataagcaggcctgacgaatgtgaaatcgatgtaaatcggttaactcacactcaggcctttgtcacaaaacagaaatcccgatttttgcccgcgacgcctgcgttgatttgcgtaattt

SEQ ID NO: 653 - DNA, 296 bp, Cronobacter muytjensii
cgcgcagcttatcgcggcattcagcgcggcagccacgcgccagacggcggcggaacggcttacgggcatgatccacgccgccgtggagtacgactttgcgcggcctgcgcttgctgccgcgctggatggcgaagaggcggcgccggcgtttgcgcgccatcagcaggagacgctggcggcgattcaccgcggtgtgatggcggtcatccagcgggatgaggcgaccgcatgggatgttatcgcgctggcgcaggggatgatcgccatggctgtccggcgggatgagcgcgacggct

SEQ ID NO: 654 - DNA, 241 bp, Cronobacter muytjensii
gttgtcacgcttttgattgagtgatgatcatttctatctttatcaaatacttatgtttgtaattatttttcttttgcagataattctgtacagaaattgcatttttatcctctgatctgagcattccaggttgtacaggaaagcgaaaacgtaagcatgatgtgaaaatttccgcctgcggatgccgcaacctgtacaaaaacgtcgctcaccttatttgttcttatctgtctgtaaaacg

SEQ ID NO: 655 - DNA, 121 bp, Cronobacter muytjensii
gcgccgctctctccctgtggcgcatgtttaaccgcatgcgccctctctgcgtgatttaacctctttcctgtacacttttttattgctcatcacgaccggacttcatacccttatccgcccg

SEQ ID NO: 656 - DNA, 143 bp, Cronobacter muytjensii
acagccgggcttttttatgtggttcacctcaatgcttaaaacgtctcccagtctccggcgccgtctgcggcgagcgtgcgggcagggctgtgcgaggctgccgctttcaccgccggctttttctggatgctgtcgccaagctt

SEQ ID NO: 657 - DNA, 119 bp, Cronobacter muytjensii
gtggcactttccagcgaaataaactgatttcgcacgtcgtgatattgttttaccgtctcgcccagcgcagtaaataacaggcgggtatctttttcccaggcgaagtgttcgccatcatc

SEQ ID NO: 658 - DNA, 286 bp, Cronobacter muytjensii
tcagatggcttgaaaatcattacattacgtatttaacattctttcctgaatgtgatcgtattaacaaaaggagagcgtttatcataagtaataaaggtttgcgtgaaaacaataagtctggttaccttttattatcggagtgcgccttatagaagtgtgctaattcccgcaaaagtaatattcctgaatagaaatctctggtttacggcgtgaggtaaaaagcttttgtcgacaaatggcggactgccgggcagatacactgatgtccggaacgctcattataaaa

SEQ ID NO: 659 - DNA, 459 bp, Cronobacter muytjensii
cgcatgacgacgccgttaacgcagacgctataccatcagtagatcctgataaagcgcatgctcaccgaagcgcaggcgataacacagtctctgcgcttacacgccgtccgtatccgaaagacgcatcgcacagcggtcagcgcgggaaaccccctgcgccgcttcttcatcaggcagacgagccagacgctccggcactgcgcgtcggcaatatattcaccccattgataaacccaaccggcgtggcggcgtcttccgtcgcgacggcgcaatagccggtcgcgagcaactgccggtgtaacggctgtgattgcgcgccatcggtcgccacccggtcgcggacggggtcgcgtttaaggcgctgtccgccaactattcgacagcctcaggtaacggaacatcttccgctgcggtctttgtgattcgaaagtgcacttctgacaccctttttcgcggcag

SEQ ID NO: 660 - DNA, 112 bp, Cronobacter muytjensii
ctcacttctgggccgcagcggcatcgggcttgagggcggcggcgttttttctgtcgcagcggcgagccacgcgcactttctggtggaagagggcgacagggcacggcaggtt

SEQ ID NO: 661 - DNA, 103 bp, Cronobacter muytjensii
gaaagattacccggttaccgggaagtgaccgtcacggcggcgggccgggaggcgctacagcggctcttcagtattgagagcgcgttaacggtctgaaaaatcc

SEQ ID NO: 662 - DNA, 105 bp, Cronobacter muytjensii
gttatcgcccgccgcgcagcactaaagcgagaataaaaaaaccgccaagccccgcagtgatgatccccaccggcaactcctgattcgcaatcaggctgcggctta

SEQ ID NO: 663 - DNA, 109 bp, Cronobacter muytjensii
gttcagggcgcggtgctcaagcgcggcgacagaaggcggggccggggaaaactttttcgggatcgctactatcgtgagtccgaaacgcgcgctatggctgttcgacctg

SEQ ID NO: 664 - DNA, 171 bp, Cronobacter muytjensii
ggttgtggaactgttcacgctgttttcaggggcgttcagcgcttcgcagagcagcgttcccatatcaaagaaagataggctggagagcgctgaaaacccgtcgaagttatcagcgatgtcgctgtgcatcacgatgccgggcacgctcgccgtggcctgctgttccagaac

SEQ ID NO: 665 - DNA, 404 bp, Cronobacter muytjensii
gaaattgattttttatatatataattgctattgcctggagaggtttattatggggttgaatgataagccggcgctcgtgaacatcttaattaagaaagggattaaatcccggcatataattgttacgcttctgaaataattaatgcgcttaattaagtgttgcccgttttcggacagggcggtatagcctgttattcccggcaaagcacagctttcaatatttttaatgtcgcgggccataagtaatttgccatttttttcgcaatatccctttacagttgccgccggggttcgtcttgtgaataacaacggcgcgcgtagcatttgatgccgtaactcactgtttttcgttctcttattcattgcaacgactgtggcggcgcgtttttatggaaaacccctgg

SEQ ID NO: 666 - DNA, 152 bp, Cronobacter muytjensii
aatattacagaaagtgatttctctaaagggtacagtaataccactaaagaatttatagcagggaaagtttatccttacggctcttggtgaatcatttgttttactgattgttttttattaaataaaaacaagtgggcgtaatactgtccccc

SEQ ID NO: 667 - DNA, 191 bp, Cronobacter muytjensii
ctatgggatatggtgattaattatctcttcgctctaatgtcagtgagttttaaaaatatagtaatgctttattgattgtctgaatcaatgcctccaccactttctgagcgtctcactggagcgaatgttaacgggagtaaacatatacattgttccgcacactggaacccggttgcttttaagacggtctg

SEQ ID NO: 668 - DNA, 172 bp, Cronobacter muytjensii
ggaaatgtgggccgtggttgggactcaacacgccgaaagaacaattttttgccagtatcctgatcgctttattggtcattttgctgcgatttctgcctgcgatttaccgtagcgttgaggcgcgtatttttcgccgcgacgcgcagaaagcgcatattttaccttctgagga

SEQ ID NO: 669 - DNA, 118 bp, Cronobacter muytjensii
acgattttcagcgttaacacttcttatgtctccggcaccaaaagtgaaaatcacaacgtggatttaccatccgactgattagcccctgcgctgcgcctcccttcttcagacatggaat

SEQ ID NO: 670 - DNA, 108 bp, Cronobacter muytjensii
ctgacagagaatacagaacgacttgccaccagttcgtgtaatctatcttatgttaaatatacgggagttaccgataccgcctgatcctgcgccgccttccgatgtctt

SEQ ID NO: 671 - DNA, 151 bp, Cronobacter muytjensii
gccgcattttaaaagcgctgttaataaatactgttggcttttaagacagaatggcgaaagtatcggcagataattgattgaaaaaaggcgtttttccggtaagagcggaagcgtcctcggccctgaggaagcttccggggaaatgcacagt

SEQ ID NO: 672 - DNA, 470 bp, Cronobacter muytjensii
ccactcggtgtttagcctgtgtttaataatatttgaaatagtgattaaacatcaacagcacgttaatcgcgccgggttcatcagaatagcattcagaagggatgcaacgagctggcgggaatgtcgccagccagcacacgctatcacagtcactgcgctcgggcatcatagcaaaaacggatgacgcggtggctcgctgtttgcggccctgccatttagcgtcacaacgcctttattctctataacgcccacgtaacgcctgctacttattaaaatgtacctttgaaaaagtagctttaccgttcaggtgcctgcgggggataatctcgcgactttttacgagaaaccatcgcccgttttatctgcattttgaggtgtgtatgactgaactgcctgccgacaatttgttgcccggcccgtttacatgggaagccggtggcgaaccgcacgatattgccgcagacggtcag

SEQ ID NO: 673 - DNA, 2681 bp, Cronobacter muytjensii
ggttgcttccgacacgctctgatggtctggcccaaacacgccggcattcaccaccagcgcgtcaactgtgaatgcgctgagcgcctgctgcaggcgggcgcagctggcagcgtctgtcatatcgacgcgttgtgtagtgatctgcgggtgcgtttcttcatggccttgctcgcgccgtaccgtcgcgatgacctgcgcgccctcgcttgcgaaggcctcagcaaggccgcggccaataccgcgtgatgccccgatgatgatgatattttttgccgtcatagggttaccttttcttaccgcaggccggtcggcgtgcgtttgttctctgaagatagttcaacggactatagtctacccgctcgctctcagcccgtttatcagcaggtgcacactgccggtcagccactgtttatcggctcgctgacgcgtcatgatcatgcgccagtagacgagcgcgcccacggcatcgcaggccagttcaatatcggtcgtgggcggcagttcgccccgcgctatcgcccggcgaaacatctccgccgctctggcgcgacggccatgctggagtcgaccgcgcaccacgtcggcaagcggcggattacggggcagctcggccagcagatccggcaggatcgccctgaccaaccggtgatgcaaaagcgcgcggaatgaccgcagcagcagcgtgatatccccttcaagcgagccggtatcacgaatgtcaccaagcccgatgcccacctgcggtaagacctcgcacgccatctccagttttgaactccaccgccggtacagggcggctttcccgacacctgcccggctggcgatgttctccattctcatgccggcaaacccgtggcgtgcccattcttcaaacagcgcctgctcaagacgacgcgttttctcctcctgaagcaccgccgctccggatggtttacgtttccgggctttaacgctttgtgcgctgccatcgtcgatacgcttgcgttccattcatttttctctattttttggacgatacacttatgttccatccaaagagataacgcactatggctgacaacgcaagcgaactggctccttttgtcgcgctactgaaaaatgcgcttggcgataaggtgatacagacggcaaagacatttccggacatgatggccccagcgggcgtcatggaatttccttatgcgcccgatggcagcgtaacgctgttaaagggacgtgacgcgattgccgcctatattgccggcttcggtgatctgctgatcctgcacagtctcacactcgacagggtctatcacacggatgaaggaaacgtgacgatcattgagttcagcgccaccggcacgggagcccgaaccggacgcccctatccgcagcgctatatttccgtcatcaccacccgtgacgggtttattacccgctacgtcgattactggaatccacggattctgctcagtgcggtgggtcaggatgtaacaaccgcaaaaggagacgcatcatgagcgtgctgatcaccggggggaccggtaaaacgggccggcgcctggcacgattgcttgaacaggcggccgtgccctttcgcgtggcgtcccgccatccgggcatgaaagccgcgcgggagattttattcgactggacacgcgcggagacctggcctgcggcgctggaagggacgcaggcgctctatctggtcgcgcctcctgtcggggcggatatgctacagacaatgcagccttttctgacacaggcgttgcaaaccggggtacgccgcgccgttctcctgagcgcctcatcgttacccgctggcggcccttatatgggagaggtgcatcagtggctggctgatcatatgcctgagtggacggtgcttcgcccgacctggtttatgcagaacttctcagagcagcagcatctcgacacccttctttgcgaagacagtatctattccgccaccggcacgggacgcgtgccgtttattgacgctgaagatatcgcggcggcagcctgcgccgcgctgacagagcctgcgcgtaatgctgacgtgatcctgaccggcccgcaaacgctcagttatgacgacgtggcgcacgtgctttccgtgacgacaggccggattatccggcatgtgtcattaagcccgtcggcgctggccgaacgttttacgcgcagtgggatgccgcaggagtatgcgcaggcgctggctgcaatggacagcgccatcagcgaaggggcggaagaccgcgtgacggagggtgttatgagcctgacgggcagagcgcccggcgatttcagtcgctttgcgcggcgccaccgtgaaacctggcgcaagccctcctgagcgcgccgttatttcgggctgaccagcgcgttcgctaatcgccgccacagtctgaaagcgttctctgtctttgcgtgataacgcagttaaaaaagccgccgcagggcggttttttgttatcagcccatatctgaacggctttttcagagggctgtcgggggggctccaggcgtgcaggtttcaggaaaggacggtacgtggccgcttcttcaacaacggtcattgccttcctgaagaagaggtaaggagaaatttatcctttatctcattcccctggcccgcggttcgtataaatttctataggtgcgaaacttgccactaacagttatgtcaaattagcaaagag

SEQ ID NO: 674 - DNA, 213 bp, Cronobacter muytjensii
agttcttttactgaatcgagccagcgcttaaagcaaaccagcaaaagggtatcggcagcggaacgatcaaaaattagcccgtacggcacggttttttgtatgccgatgattctaaaaacattaaagatatttatgtaaatacgcatatgctgtgtgggtatggttaagcgacgcgctcaggggagcacagcgcaaacctgataatcggggggc

SEQ ID NO: 675 - DNA, 190 bp, Cronobacter muytjensii
ctccgtggatagcaggcgacgatttcacgctggcagatatttttatgactcacactctgctctgggcaaagctttgcggtatcgctcttggtgaacaacatgaggattaccttactcgcgcctttgcccgccccgccttccttagtgcgcagcagcgcaataatcagtaacgcagcctctgtaaaaagcc

SEQ ID NO: 676 - DNA, 108 bp, Cronobacter muytjensii
gcaaaggtttttaaaaggtgcacgccatttcgcctttaaaagaaaaggcgtacgtaatgggtattaataaaaagaaaggaattagcgtaaaggcggaggaaatagcgc

SEQ ID NO: 677 - DNA, 175 bp, Cronobacter muytjensii
aagtcatcagtttgttattaaaaccgacaggcaagcagccaaaataataatggcggggggaaagataagttgtatttaaggatgaatgtcggcgctgccgcgggataatgtatttaataagcgctacgttaatacgtaaaacggctttcgtcaggggcgaaagccgttggttgcg

SEQ ID NO: 678 - DNA, 148 bp, Cronobacter muytjensii
ctgatttactggccgttcagccgcaccccggctcaggagaaaaacacgattaccgggttgaaataccagccgctctttaccgttccctcggacgatccccgcacgaaaaagactaaaaacaacccggcggagtaattgcttcgcctct

SEQ ID NO: 679 - DNA, 138 bp, Cronobacter muytjensii
tgcaaaaggcgatgccgcgtgcgacacggcatcggatgaggcgtcaggcgctcgcgaggcgcgcgcactgctggcgcatgccgtcgaagatctggcctgtcgggagcgcatcctccacacgggcgatcgcggctggcg

SEQ ID NO: 680 - DNA, 105 bp, Cronobacter muytjensii
gctctcctcctgcgcctcctggtcggtggcaagcgcgcacgccggaagcgcggcgtccgccctgaccgctgccagcagccgctcgccatgcgcggcatgcgcgtc

SEQ ID NO: 681 - DNA, 417 bp, Cronobacter muytjensii
agtcatggtaatggcgatacatttctggcgtttttactgccgaaacaagacggcaacccaccacacaggtgagttgaacataacatctcaagccaccaggcgagattctgaggcgggagggttgttttcggcgcttttccccgccccgccctttaaaaggtctcctgatacatttcatattgtggcatatttatgctcaaggacgcatgacagtgctgttcacggtcagagctttgcttaccagcgtttatccttatgctgacaaccataacggcgactgaacaatttgaccataagcacaaactgcagcagcgtgtgattataaaattcgcattacgaataaaaatactgcgaataaggcaagcgcaacagaaatcactctccattttttttcatcttttccccccttaaggtgag

SEQ ID NO: 682 - DNA, 1424 bp, Cronobacter muytjensii
aaaaaaataaaatgacataaactgaagaagcaatatcaagaataacgcaactgcgccaacttcgttgccgctcccatttccattatcgacaaagttcccctccgggattgatgggtccatttcgtaaatgagagagtatttatcttctgttgcaatcagcatagctgcaagaagtgcaacaaaaaaaacgatcgataaaaccttaataaaaaacctcacattacctccaaagcaatttattaaagtaaacccaatttttaactataaagtcaccgtaacggctatctttttttatactctctaaggtaggttttgtccctctattataccttgcaccaataaccctgatgtcatcaggttctagtatggctggtaacttatcaaaatcagccaactgccttaaatgcatggcagcaagataaatgttatatgtatctttctccagacacactgaaagctcccttagctcagaaacactcatgttatcagtattcagtcccatggttctcgccgcagtcctgagctgcatactgacaaagccgaatgatgttttttccggtttttctgtaatagaaaagtgcttatcgataaaatctggaccgctatggtcaatgactcttatctcaaaggcatatctgtcaactgcgtttggatcaccaccaacttcaatccagcaaaccccggcgagtaattcaggtggcagtttgaacatcatggaggcgctttttatcaaagtcctgtggttaattacccacgcatctttaaatcctttggcaaattttcttcctcctccaaaccgctcaggtatcactttccatttaaatacatccataaacgtccatgatggtgattggctcattgttttgcactgagagaaatctcgcatatccatataaacctccttttaatcattcaacctgtccagggcattcattttttatgatttttttgtatctcgtttccaccaactgacctgataaagcagtagaaccatccctgtattggtcccgtcagcgccactcttttaccagtttttcccgttgctccctcgcccgtaccagcttcagcactaccggttcaaacgtctcagttgcccacccaggcgactcaagcatgtcacttgctcgctcagcgtcacattctccccttacataattctggcgtaagttcaatcataagagaatggctaaattataccaaaagtgctctatgatacccgtttaaaaaacgggcttagcataatatgtttttcgttctttcggcagttcctgtaccgctattatttcgtcatattgatggcaatcactgagtataagtccagtataaacagtatctggccagcctgtttgttaacttgctaagttgttagcttaacaagtaacgcctgttattaagctgtgaaagcgcacagatacgcttcatgg

SEQ ID NO: 683 - DNA, 454 bp, Cronobacter muytjensii
tgcatggtaaaatcatccgggtgacataagcagggttgttcgaagctgattatgctgcgcgtcatcattacgctgagtgactatttgttagaaaaggattgcagggggcagaaatggatgagaaggaactttttcgtgagctgaaggacagtggtcacaaatttgtctggtatctccgtgaaccaggtatcagcaacccggaaggtaactctcctgaccttcattttattatcgatctgaatgggaaggagctggcccgtcgcttaaatatccaggaaatgccagaaattggctggcgaattgattactggcatgcgcgggattttggaggcataccgggaggtgctgtgaaaatagatttgcatcaggtgttaaccaggttcctgctgggacaaacgggctccgtgcttccgtagccacgtgtcatattcgagggcgaagcgatcataatagc

SEQ ID NO: 684 - DNA, 573 bp, Cronobacter muytjensii
gaccatcggtgccgcaatgggcggtgtggctctgacgcatcgttttacgctaaagcgtgaggaagcagccgcaaaagaaaagctggccagcgagcgcctgtttatcgctacagagctgattattattcttgagcgatttgcagatgaatgtgcgcaggaagccatcaatgaaggtgagaccataatcgtacctggtggacaaaattttcgtaaaggcattaacagtgatcctgcaccgcccgattacgaaaaggtagctggcgactggcgtagtctgcctcctatgctgatgtaccgtatccgggaactgcctgtgctcagaaacgaggcaatgagagtaatcacatccacccgagaaaacgataccgggatgttggatgattactatcctgagcgtcagtatcagtatgcctggctgggccttaaatccattaggcttgccagagaacttcgtaggatttgcgaactgcaacgctccagttttgattcttcgtcttcttggtcacctcatgcagcaatgcttgatgtcctgcgacgtgaactgaaacgaagaaacagggagccgaaagatga

SEQ ID NO: 685 - DNA, 1144 bp, Cronobacter muytjensii
ccaggcacctcacaatgctgagaagctgtttccattttctgttattccaatacacactgacataagcggccgttccgcctactaaccccactatgctatgtctctcattacctgatgtcccgatcattactcacaccgaccacacgctcaacctagagatttatcgcactcgttgcacgccagtgcatcggatgaacggatggccagaccgtatttattcgcacggacttattcaggccatgagatttttctctactaaagcttagcaagtaagacagcagactcttactgctgtttttgaatcctgcaacattagtaaatatttagttagagttgatttaagcacctcaaaaagccctctggttagttttcgcgtggaattgagtatcgataggcgtgaaaccagatgctctcaaaatgcttcctaggaagtattttcactcgagactatttacactaggaaattctcaggtatgtttaatatgaaccaggcggaccggtatcgtcgcttggcttggccttaacaaaacaagaggtacagaaaagtgagtaattcacataaagttatgaaaaacggaaaaatgctgcacgggaacgcggctacccttcatctggccagtaagagcggcggaatggatcaattcattgaggaaatcgtgaatgttgcggctgtcacagcggcacaaacagcggttaaaactcatattgcacgtgcatcacgcccgcctctgcaggtcgtcaatggaggtaaaaaataatgaaacactgcccgatacataactgccctctaacgccggttggtatgcagctcatctgcctggaatgtaacccgttacataaagtcaccggttatatcgatctgcgtcacatcttttaaatccgcaccatgagagttttcatgactcagccataccgtccgggtactgcaacgcagatacccggatacctccagtattaaatacttcgttttacataaatctgctatatagctacgttttttatgatgccatccatggcccgcaccgggataaaacttctctgttttgcgcccccggaggctacgacgcgctttcactgtaaccctgccgttgcggctacaagggttcgctgccgctttgctcaaagtgttgtgagcaggataccg

SEQ ID NO: 686 - DNA, 115 bp, Cronobacter sp.
  genomosp1
tgaagggcgcacattttagatgccgttttagcggttctgtggcgttaatttattcgctatatcaattaattgagagccatacagccttcgtgatgacttttgagacggaatattt

SEQ ID NO: 687 - DNA, 180 bp, Cronobacter sp.
  genomosp1
atgattcgggctttcgtcatttctgcggtataaaagatgattcctgtttgagagatatttcttttgactggcctgaaatgagattcaacgcatagcctgccatcaatttacgcattcggccgagtataatctatacaaaaaggccgggaatgtatcctggccagtagagatagataattg

SEQ ID NO: 688 - DNA, 149 bp, Cronobacter sp.
  genomosp1
tttgctaaaactgggaataatggtttttccgaccgatgatgctaaagagtaattggtcccggaaatttcaattcctgcaataggttccaacagacctaccgtgcttggtggggttctttcgctaatatagagtgtatctaccacgccag

SEQ ID NO: 689 - DNA, 154 bp, Cronobacter sp.
  genomosp1
tgagaaaaccataataactgggttaagagaaggagtataaggctacgcatcagcgtattattgcaaaaaagggagtcacggttactatttttcatgttcatcgtaaaaatgaaaaaagccttaaaggctattttaatggatagagatgataaac

SEQ ID NO: 690 - DNA, 187 bp, Cronobacter sp.
  genomosp1
ccggactggaggcgcttttttcagacgcttcttccccgccagcccccccccggtagcggccacttctcttattaatacgccggacggaataatgcccgccaataacggctccccacgcggctccctaacgtaaattccactgttcctgcgcttgtgcgccattatctgcggctctgtccaaccttgt

SEQ ID NO: 691 - DNA, 273 bp, Cronobacter sp.
  genomosp1
actaataacccgttgttatactgtggataatgaaatcggagggtaatggtttgacgaattatgttatgtatgaaaatagccgcgcattatttttcttacttgtctcgctatttctcgtgataataagcattgcttatgttttcagggcgatgattacgggcggagggctttttgctgagcgctccggcgagcggcgcgttattgcctgccagcgccttgtcgcgaatactctttccttcactgtcgccaccggcgcttcggtgagaacgaaca

SEQ ID NO: 692 - DNA, 203 bp, Cronobacter sp.
  genomosp1
aggccggcaatgtaaagaacgctgggagcgcagcggcgaatgctttttatcactgatagctatcttatctttagactcaatattccagatgcggatatttaaattatcaattattttacgataataaaagcggcgggtttttagcctggcaaggcataaaggggcagtaagcgtgaagccggttttattcctaaataataacg

SEQ ID NO: 693 - DNA, 328 bp, Cronobacter sp.
  genomosp1
ggtcctgctgccggaataaacccatcgcctgcgggaactccttttcttattcctctgcgcctgcgcgaataataggcgattgcccgccgcgtcgccgtgctaatacttttttcttatttccttttcgctaattctctgcgtgcttaacgcgggggtataaatatatcctccgccgcataataagtttattttctggtaagcgcggtgccgcgcgtaataatgcgccgcgtcttttcttaagagggcggttgataccgtgatcggatgtaggctgacgcgataggcatagcctgtgtttgtctttcgagagactaacaggtactctatt

SEQ ID NO: 694 - DNA, 159 bp, Cronobacter sp.
  genomosp1
cggctggtttatagttgaaaaggcgcagtagaggcttaacggttaatttttataatggtcttttttatatttgcgaaagcaatataaaaaaaccaattatccagaaagagattatttataaaaaaagcggcgtatccgcgccgcttttattttgtggtt

SEQ ID NO: 695 - DNA, 116 bp, Cronobacter sp.
  genomosp1
gtgttccccgcgtgagcggggataaaccgaacgctacccgccacacgtccgcgtaagtcttgtgttccccgcgcgagcggggataaaccgtggtcgggtagaatcatcagggctgg

SEQ ID NO: 696 - DNA, 114 bp, Cronobacter sp.
  genomosp1
gaagcaaggcattatgcggaaaggcggtcgggatgattcgtggtttacagggcgaaagcgcgtattttgctggtggaaaaagtaaacggcgcatcaacagcctctttaagctgc

SEQ ID NO: 697 - DNA, 101 bp, Cronobacter sp.
  genomosp1
tctaactcgcgcgcgagctgttcgagcgtgtggcgtattttcagcagatactcgcgggcgtgccgcgtcccgaagcgtatcccggtaaatttcttaatcta

SEQ ID NO: 698 - DNA, 152 bp, Cronobacter sp.
  genomosp1
tacccaaaatcgcgtcgattggcttcgtgtgctcggtcagatgacctggtgcaagattcgcatatcgccttaccatttccattgactccctgccgccccgggcccgactgaataagccagcttgcccaggcgcgcgcgtcatccacgcgcat

SEQ ID NO: 699 - DNA, 119 bp, Cronobacter sp.
  genomosp1
atctgcatagtatgagttgcaaagcagaccattaaaaacgctaaaacatacgtttcttctaaagaaatagagagtgctgccgatacacattatttatacgatttctctacctgttttcc

SEQ ID NO: 700 - DNA, 110 bp, Cronobacter sp.
  genomosp1
cgtgtataagagaagccatgatcgcccggcggcttacttacactccgctttgagcgtaaagcgaacatcgaaacaccttctcattaagaggtctgttgttcctgattaaa

SEQ ID NO: 701 - DNA, 730 bp, Cronobacter sp.
  genomosp1
atcacattcaggcttgccagtgctggccgatgatctcccggatgacgggatatttttcagcctcgaccagcgacgaacagaaaccggcccgcgagtggctcagtcgctcacgcgcccggctccaccgggtgacgacacaggccagtatttcaagcccgccggggcgttccgcacgccaggcctgtgagccataaaacacgtcgctgaatatctcccattgctgatagagtttttgcagcgcgccttttgccagcaatttattttgatcttctgagccgtcaggtagccatcgttcagggtaatcaataattcccacagcggcataacagttggcgctgatataaaccagcccgcgtaattgctgagcgcgtacccgagcctccgaagataatagccccgaatcggggtattccatgccgagatgaataatgatggctgtgctttccgtcattactgagccatcaggaagcactaacgtgggaatttgcactaacggattgagcgtgcgtaatgcgtcaatatcgctctcttcttgccacgaacttgccgtaaacacgctgtatttcgcgccgcaggccttaagcgccatctcaatggcggcggagcctgaacgcgcggtgccgtaaagtttatacatggttatttttcccgtgactgatataacctgatagtagcagagcgttctggcgtgcggtgaacagggcatcggtcacggatatgcagaaccgac

SEQ ID NO: 702 - DNA, 235 bp, Cronobacter sp.
  genomosp1
agaagaaagggctttttatccatagtgtttgctaactaaccgtatctgaatatttcaggaaaaatgaggttgatccgcctgattttatctttatatgaaatcaaattacattcacttgatttatatttgtcgccttttgttattttttctataaggtctaataattgtcaataatatacttgaagtggaacttctctaattataaattaattgtgttgatctgatcttaaaggaa

SEQ ID NO: 703 - DNA, 527 bp, Cronobacter sp.
  genomosp1
tgcggagctcttagaaacgcatagtacgacggcccgtcttgcgctgactggacgtttaaactatgcgcttaaattactattagcaagcctgaatggaatgctcactaaagagcaagaagaattgcttaccatcgaaaaaaaagcagttattcaaacagatgaagcttttagtcctgataatgatacattatgtgaatactgtttatctcttacagaaatattactaagtggtgcaatagatgagataaatcaaaaaaatatacttgggttattgttcgaattggtaaattacctttgcgaaagtttaactacccctcgtttttacaattcagcagaagggttacgttacctatataatgattcattagttcagaatggcctataaacttggctgactgtcaaaggtggatgatttttttatcatcagcgattatgacagtaactatgaatagacaacgcttaggatgttgttaatgtattaaaagaggccaagtgcctctttttttgtaggtgctataacctgtaag

SEQ ID NO: 704 - DNA, 518 bp, Cronobacter sp.
  genomosp1
ccccgccggggcgaggtcgattagtaaattctgctatttatggatttgactggaaaataaagccaaccttatcagcagcaagatagtaataatcaacatatcctgctccatcaagtgagaatccaatgcagcgtttgtcatttaactgactgaataaacgaatggaaacttctgactttaatacttttaattgattgttgactgaagggccattccttcccggcttaatgccaggcgtgaactctgcctgcattttcagatcgggatactctcttgtatgcacttcgaccattttaaccttccttttgatagaccgggtccgttccccgtggaaacttcatcgactcttccctgtaaaactttagctgctcctgaaagtactcccgaagcgcttccggctgttgcatctcaacttcatacgccactaccggcatattcatgcgctatttataagcaacgcctgaaggaagccactaaatccacgttaatcttatccctttcttctttgctgcgcgcta

SEQ ID NO: 705 - DNA, 499 bp, Cronobacter sp.
  genomosp1
cgtaaagaacgtcgcagaacagtctcaagttcgctacgaacacgcccagcgagagcgctgtagtcttctccgtcaaattcataaccgtcttcgtacatgaacgaggcgacaggagccatcacatcgtgctcgcagttatcaggcaacttaaccgcgcgcgcctcaagcccggcattgcgcttctctgcggcttccagcgctgctatcagctcaagcacgtcacgcgttgagaccacaacgttggggcggaaatcatctttcgccttctcagccgccgctttcagttttgccatcagttctttggtgttattcatggttgggccccatgcgttttatttttaccggctgcacagggatagctttaagctcaccatcgtccagcgctgcgagttgagcggataccagttttgcctcccactcattcagagttcggatataaccctggcctgttgatgcatcagtgaataccagtgcagcatccgctaattcgatttgacgg

SEQ ID NO: 706 - DNA, 156 bp, Cronobacter sp.
  genomosp1
gagctggcaattccgcccaatgtgtcacttctccaatcgttgaccagtcattgccagaatgaatgaccgggaaatgcttctctgaatgccttgactgcctgcaagcagccatgccgactgttttcccatctgtgaccataacgtctgtattcacag

SEQ ID NO: 707 - DNA, 1216 bp, Cronobacter sp.
  genomosp1
ttttagaggatgggggtaacagaaatatggataagccggatttagctagcccaaaaggtttgatcaggtagggtgcctttggcttgccactcagtcataaccttacgggccgccctagcaaaatataatttcctgttatcatctggcattgaagatatcagcttaaggtcgcctgtttgtgagttaaccgcaaacttcccctcactccctttttcgcttacaaaagaataggttacactagttggtgtcgatttaattttttttatcctaaccagaatcgccatcatatgcctcctctgggttccagtgatagcctagtccaatagcttcattgtgggctttgacgtaatctaatccttttctcctctcaagtatagactctacttgctcgtgcttgaagaaatcgatatcactttcaacatggtcaccttcggtgagacgactccatgcattgactatctctgggtctggatcgaatcttcttttctcaatcaagtcatccactataaaaatgtgttctctaaagaagacatgatcttttactcgagtcacaactcttgatgattcagagatattgctgcaaatcctatctatgtctttgtgatcgttccttatttcttcataatgccgctctgcttcgacccagctatcactatcgttttgatcaagtatgatgcgagcctgctgtgattttagctttgactcttccgataggattgcatctaagtcacttaaatacttattaaaagcatcatcattgatcattttgtgatttcagaaagacctagttcttcaacaatataagacatagtaaaggtatgataatcaacaaattctttaaagcttttggcgcccatgccgtatggtcgaattagcgtgtaacaaaacatagcaacgccatctttaacagaaagatttcctgaaataatctgaaagttgatttcattaaccttttttaatacttcatattcatttaggccatccttcaattgtaaggtaatcatgaacaagatgttaccgctgggcatcatagcggcacttgatttaacgccttttatagtaaaaataagcctattttcaacaacttcatcacattcataaccgttttctgataagaatttctttatgtcatcaagggtagtttttttgttgatgatatccatatttaatcccggaatggcttcgtgtgtttatatcggttaatgagagtgaattt

SEQ ID NO: 708 - DNA, 239 bp, Cronobacter sp.
  genomosp1
taacccgttatcgggcaggtcttgatgaagacggcatcgtctgtcacagagagaaggaagatggcaggtgggttaagtacgaggattacgagcaacttgagaaagagcttctggcgctgcgcaaagatcgggagaaggtagtcaatggtggctgcgaaaaatgcggcggaaatggctctgtcgaaatcgaccacggcgagatgggaatagagcacatgcaatgccctaactgcgttgca

SEQ ID NO: 709 - DNA, 108 bp, Cronobacter sp.
  genomosp1
gtcctgatgactggatttaccggcgcaatgtttcttattggcgctatcgcaatgcgagatgggctgatgttcaccaacgcctgtgtattcatttgctgttcgttgttg

SEQ ID NO: 710 - DNA, 428 bp, Cronobacter sp.
  genomosp1
cgggtaaaaagtgaaacaggattgaatcttgaccggactaactacgcgctctcagaggtgggtgaacagcaatatatcgaccatgacaccaatcttgcatggtgggcatggcaggcatcccgcgcggcggttgagattgagttgccgccaacaacagaagtacacccactcggaccaagcacggcgaaaatgttttgtgagctgcataaaaacactgtcgcagaatgtgccaattccatccgcgccgcaggtctgaaaattaagggggagtgatgagtgcatcagtttttgtcgtaagcatccggggctttgagggtgaaatggaatcagtggctgcattcaccacatataaaaaagcgaataaatatctgaagagcaaaggaataacttcatgggcaattgaagagcttaaacttgacgaggaatgc

SEQ ID NO: 711 - DNA, 135 bp, Cronobacter sp.
  genomosp1
tgttacagatgcggtgagctgaaagacgattatcttttccgccctggacagccttactggtttcagtggtgtatccggtgcgagcgctctccgattggtcagtttccgctacctcagactcaggaggacgtatgg

SEQ ID NO: 712 - DNA, 189 bp, Cronobacter sp.
  genomosp1
catggtagggcgcgtagtttcacagagatttcgcaccgactactgcaacgaccccggcgccgcatggccgattattcgaggtaacaggattgggataattccagccccttgcgctggcgaatggaaggctgctcatcgtgatgttggtgacgatggaactcctcgccattttacccgacatatcaaccc

SEQ ID NO: 713 - DNA, 315 bp, Cronobacter sp.
  genomosp1
gaaacatgaagcccctgagtttatcgctccggggcttttgttttattggtcagattctttcaggtgcttcgccagcatgttgagtgctgtagtcacaacatgagattgcggcgctcccatctggtctgacagttgctccagtagcgcgatggtgtcagtgtgaagcttaatgcctttaaccttcatcccgcgcttctcatcgctacgcttctgaatgtctgatattgactgtgccatgctccaaccttatattttgagttatgggttggtccaaataatcaaattattaggctcgcttcggcgggcctttttcgt

SEQ ID NO: 714 - DNA, 249 bp, Cronobacter sp.
  genomosp1
ttcaggactacatcaggcagcagtgcctgaaataagtcgcctgaaatattgataggtccatttagtagcggactggattgcgtttgctacgagcattactacgacaccactgacgatttgatcaagcatgaagcccccttgtttggtttagttgttaaaggggtgccaattcaattgccatcccttgcttactaatccttagtgaagcttaccgagattcattacagatacatcagcagcacaacccct

SEQ ID NO: 715 - DNA, 178 bp, Cronobacter sp.
  genomosp1
atggcctgattaagcacagccttatcgcgagacaagcggtttttacgatctcatttatggatgggctgatggctataaaagccgcaatataaatttctgacgtcatgaatcctcctgtggatgttaatcggacgctttgttgctcctatagtccgccctaattacttaatgacgaatg

SEQ ID NO: 716 - DNA, 545 bp, Cronobacter sp.
  genomosp1
gaggtactcaacatggagtacgtacttgctcaaagcgacattctgcataatgagaaaatctgaaagaatgcccttatggataatatcaagggcacttgatgacttaggaggaaggtatatagggtgcaagaagtggcagaaatggtgcaacaatggacacatgttgagctgtgacctctataaatcttaaataggattttttgaaatccttacctttgtaattatttctcatttgttcgatagtttttgaaattttaacaaaatcatcgacaggcaccttcgatttcatctcctgctcaatagtgtcgatagttttatgaaaattctcatcgttggtaaaagaagaatcactgaagttgttgttgttgctattgttaaggctgactcccacatcgaagtttttaactttcatgcctgaaaagtcattaccatggctgtcttccatcacaattgcacagcttttactgctatctaagatcgatcttgaattactcataggaccatcctttactcaaccataacattttcgtgtagttaaaaggtat

SEQ ID NO: 717 - DNA, 168 bp, Cronobacter sp.
  genomosp1
tgcatttggtgaatccacgcagatggagaacattgctcgcatggcagtggaggcgggatataaagacctcggcgaagcgatgaatgacaagatgatgaagcttaatagcggtactgattcagcgctggtcactcaatctggaacaacgtctgtgctgtcggttgctac

SEQ ID NO: 718 - DNA, 264 bp, Cronobacter sp.
  genomosp1
gcaaattgcattaattcatccttatctggtgtgtatgtcgaaattacctatatcgactccactggtgagcacacatataaagccatcaaagaccgcaagacacatccgaaggcattcttcctctacctggggtttgacagcgattcaccaccacctttcttcccattgggtaaaggtgattacgtaagctcatcaattgtcacacgagtaaaggttaagcccatcaaagtagggttagaaccagaccagcacctggagtatgcc

SEQ ID NO: 719 - DNA, 1161 bp, Cronobacter sp.
  genomosp1
tctgcgacaggaaatgtgactgttactttaccggatgggagcacgttcactgggccatcgtggggaagcataaccacctcgcttgcagacaaagcaaaaaaaggcgcaaataatgacatcacaagcctgtcagcgttaactacagctatcaccgtcgctcagggagggacaggggcaagtaacgcatcggcagcaagaaataaccttgggctgaaaggtgccgccataatggatgccgtaggttcagtaggtaatagttcagccattattgagtccggagctacatccagtggtaattatttgaagttcgcagatggttcaatgatctgttggtttaaccgtggaagtattgatgttaccagctcagcccgaaccgaaggaagcacgtctttttactggctagcctatagttgggtttttccagcggcatttttcgatacatccaaaattgcaatctctgtaaccaccgctgcgtggggtggttctgccggtacaggtgccagtgcggttatgacaggatcatcaatttcaggattaagcacaacaagtgttgcagctcgcatatacgcaccaattcagttctcctcactatatccgttaacgttaattgctacaggaacctggaaataatgttcaagttaaagctaattccacagcacagagaagacatattatcaatcaaagcgaacaacgcagtgttaactgtaaatggtgaggactatgatttcagtccaatgagcgcgggtgactatctgccattttcagctgtagattgcgtatttttcgtcgatgggattttctgtgatgagcatggggacataagtgccgctctggtatatccgtgcgcgccgggagatgtggagatggagatacaaatggaaaatggcgttgaatactcatttggtaaaaaggaggtcgaaggtgatcgactggacgaaactcaacaaagctaaagacgtgtctgatgctgagcatctaaggatgagggatagcgtggtaagtcagcgcctggcagcatacagggctgagtcagaccagttgaaagtagaagccgactatgatgccgcagtcagcggctcaaagccagattacacggcgtgggtggccaaggtaaaagagatcaaggaaaggttcccaatgccttgattaactccctcatac

SEQ ID NO: 720 - DNA, 1815 bp, Cronobacter sp.
  genomosp1
cttcgcagaaaaggcacgcctatgatgattaaacactagtattcataagcgggtggataaaatacgctcaatatccatccgctatgtctatgtctatggctattgaaatgatattaatacaaaagttcggattcattatggtttggtttttatgcctttagaacgctttgctgtatatcagttacaggcatggtttggtctggcggtgtgatttattaaattatatgttttttcagccaaaaacgtgaatcatgaagcgctcatcgtttgcctctgacttttcattatcccaataaagcttattgtcgcactgcctggataaaaaaggtggaattaatgatggctaaactccacccacaccaataaatattagcggccgcctaagaataaaaaccttgttatccatgcttttttcaagcacttcgctattaaaatgcacagggcaataataaagaatgcgtagattggagttattataaaattatatatgatgctattgtcacaataagcagtgatgtcaatgtaatttgctattctgtataaaataagtgttgaaattatgtaaattggtaatgtgtagataccgagcgatgatgcgagtaatgtaaacaacttgagtttagtggtatatgaatatagatatatgatagaaaagcatccagcaaagccaatagcataccgaaacaaaacaaccttcaattggttagtaaattcaacgccatggaatgacatttttgttatgtaaatgtagtcgcttttatcccagaaaaacaacattacgatccaggttatcaaagaaattaatccgagcttgtgcttatttgaacgtatgtagttaatgaaataatgtacacttactcccagcagaaaatatggagccatgaactttgttctgtccatattccaggaatccccaaaaaagagagaaacaaagaatataacagaaaatattaaccagggtttgcctttgtagacggcttgtgatagtgacatcgttatcgataaaaaaaacaaagaagacaggaaccagaaagggaatactaaaccatatctaaggtttggaatgttgatatctctccctattaaaatggattccagtataaaccatgatgcagacggcaacatgagttgaagaattttcttttttatcagctcacccatctcattccgttgcagactataaaagaataaatatccacttattatcatgaataatggcatatggaagctgtaaattattataaatagcgggttctcaaaaaacgacactccagcttttttaacaaattgtatagaatgaccccaacaaaccaaaaagatcgctaaacctttaatggaatcaataaatagcattctttcattattttttttaagtaacattggttgcggcatgattaccagataattatagcgttaatatactttaaagtttatcatgatttatcgtgattgacaaacaagtaattatttttgtgaattttatccttttcaaattattaaacaggctttagtggcagcgtggtgtacttatttttttttgcacattttgtaatatttctgattaagcaatcaatctctatcccttcctctcgtctcaaaatcacactcttgttaaagttcttattaatatcaaaaacatacttgctgcattcatattcagcttttcaaaaagttgatggctatgtctctatacaacgacatacctggagttttcagtagaggggaacgtagctccaaattgttccagtgacgcgaatatactgattaagtatatacctgtcccgacctgcttaatggggaggcaattcttaaagt

SEQ ID NO: 721 - DNA, 131 bp, Cronobacter sp.
  genomosp1
aattaattcatgggatcataataaatcccgcacccgccataaaaacctttctcgatatttttatctgcattttctcatgaaatcgctttcattttatcaatcggtctaaataagtgcgcttttgtagtatt

SEQ ID NO: 722 - DNA, 136 bp, Cronobacter sp.
  genomosp1
ccaaacaccccaccccaggggtctgtgacccgcctttttacgttattgcccgcttaccctgcccaggtattcgcttcagtgccattgataataagacgccgggtttcatctggtggcagcgtaaccgccagctcac

SEQ ID NO: 723 - DNA, 112 bp, Cronobacter sp.
  genomosp1
taaggcaaccggcaggcccctacagaaaaccccggtacagcgccagatagaggcgcattatccagagtgacgataagccagcaattccaggataaagaccagagcgggcaga

SEQ ID NO: 724 - DNA, 100 bp, Cronobacter sp.
  genomosp1
gcaggcgtaatctctcgcagggcgggtaagccacgccacccggcgaatacgtttgtagggcgggtaaacgaagcgcacccgccagaccgggccggttatc

SEQ ID NO: 725 - DNA, 2429 bp, Cronobacter sp.
  genomosp1
tcgttttcgaaagattatcaaagatttatcaaaacagattatcaaaaccctcacttaaacagatgtcgcttcctgtttttctgcgttcgccataacaatttaacgcatgacatattcgctaatgtaagtaaataacagatatttagttgttttacctcccaatatcaggaactgaaaaatccgattaccctatccttaagcccctttatccgggatggctggttgtgttcgcaatcttgtcaatatacaaaaataaacattttattgtgctattaaaatctttgcatgtgtatttatatgctggtaacaccattttatctctgtatatttaagtgggatctttggaggcgctatgcataaacctaatcctgcggctgcctttcttttttctggcgcttttgccacgcctgtatctgctggtgattcaatgtctgtgaatgatgcgccaggcaaagagcatggtgcggaaataatgcatggagtgaatgtaatgcttaagcgcgatatgaataattttacgctggtagcctcagggaatgatatccggaatatcaatgattctgtgggggatatttaaaaatatacatctgttattccgtgggtaggttttaacgtcacgcaagatataagcctgtatgcggttgttggccttgcttgttgttcaagactgaaacctaatcaaaggcatgagatttatggaactgcatttgatgctgtttttttacaacttaacaggcagtttattatattaattatatatgcatatttacttgaagtgtgcattgagcacaataaatcctctgattctatatattgcgacgcttattaccggagcactcaccacattctgatttaggttgaacagcattgagccttaaagcgagggggtaatatgtcagtattgtttttatgcatttttctggtgatgctaatggttgttgttttttattttgttcgaatgaataaaaagagtatggatataagtaaattcgcagacttactttataaagatgataaagagaaataaatatttaaatgaggttgggtaagtgttgactaaaactcaaaacaattttttgtggatgattacagagaaatcaatcggcgtagtaggtcttttctttataaacgctttagtcgctaaatacctggggcctgctgttattgggcaaatggcaatcgctactgctatttttcaaattgttcaggttgccggcgtgtttggtagcgatagtatcttctataaaagaataagtacaaatttaaaaagcggcattgaattaatgatgcctgtatttttattgagaagtgcgatatttatcttttttgcaagcgcctgtatgatgtttttgaatgcgaagatggatttaacagggatgatattagcactgtcaatatgtctggcttactatttttacaccattgacacgtatacaagttttaatgagtcattgttgaattcaagaataaatgcccttgcaaacgtaactggccttattgctggtttggtagcaagggcattaatggttaaatataaagcaccgattatactttttggattgcctcttgtaataataagtgccatcccttattttctgaagttgtatttatttcgaaagcaatatgaaaataaaggaacaatgaaacataaagctttaaggaaaagattttttcatctgagttgtgctggaagcattctcgttattccttctgtcattgcatcgatctatccgagattaaatataatggtaatttcatttctgtatggtaatcatgatgtcgggatctattcagtttcccaaactcttgctacgagttggagtttcattttattatcgttattaacttcttgccttccatcgatattccaggataaaaattatccgaaaataattaacctgggtgccaggttacatctgaatatcattttattgtcgattccagtaatgttactaatgacacctttgataagctttctaattgtttacatatacggaggatcgtataaagggtcgataactccctgcattttattatgtttcgcaacagtattgtcgacacttggtatggcttcatcgaaaataataattaagctttcgggatatagatttctactatataaaactatatgcatattatttttgagtctggttctttcctatttgttttctctcaggtacggattgattggcgctgcctcagcggttatcatcactgaagtttgctctctgactgttattaactatctgttcatgcaaggctttatattgtcagtgcatattgagatgttaaaaatgatatacgaacgcatacgaaatttttctggagtagtcagattagataaatcaaattaaagaaagcctcaaatgaatgagttaaattaacaacaaggatggaaactgtttagccggtaagtgtcgctaaccaat

SEQ ID NO: 726 - DNA, 144 bp, Cronobacter sp.
  genomosp1
cgtcagttttcggagcgccgggcttgcggctaacagggcgggcgtctaacaggcgagttgccgggcggcgtgatgataaaaatggtattcgacatcgccgacagggcatttctcgataacctggcggcctgtctcatccagcgt

SEQ ID NO: 727 - DNA, 171 bp, Cronobacter sp.
  genomosp1
ccccaccggcgcacgcaacgaaagagtaagacgtggcttatggtaatgacataacgcaacgttaaaaaaaagcgccgcgctttaaacgactgcggaaaatatatttcagaaaaataaacggaacacgccgcgacgcccccccgatattttcgctatttattttacggtggc

SEQ ID NO: 728 - DNA, 115 bp, Cronobacter sp.
  genomosp1
cgcaaaagcgtgataaaggctggtgctgccagccttttttattgcgccgctttagcattgcgtgtgttttcaccgccgtggtttatttgtatccctctttattttcaatggcctg

SEQ ID NO: 729 - DNA, 259 bp, Cronobacter sp.
  genomosp1
gccccgctccataactaatctgtaaaagaatctgtaaaagccggatcgcccgatccggctttttatttctgctccgtttcatcacgtttcttaatattacttagctgttttcatcgccagtccgtggccattccgtgctaataatttcattcttatcagaataattctctgcgcctgcaattttggggccctcctggtcgcgcttcagcgcaggaaaaatatccctggcgtaatcaggtattttcgtctggtgtcagtt

SEQ ID NO: 730 - DNA, 106 bp, Cronobacter sp.
  genomosp1
accagacggcgagcgcagggcgcataagagcagcgctgcgtaaatcctgatttttacagtttgtaaacccagcgatacagcagaaatgaggtgacagtttgcgaat

SEQ ID NO: 731 - DNA, 127 bp, Cronobacter sp.
  genomosp1
gggacgtgcgattgcgcagtaacgctgtcagggagttttaaaacgatgaagggcgtggtgcgccagaaagggagcataccaccagagaacaagcggcggggcgaggggcaggggagaggcaaaaagg

SEQ ID NO: 732 - DNA, 216 bp, Cronobacter sp.
  genomosp1
aatcccggttctgaataaagagaccgctatgacaggccgggacgggaggcgcaggacgataccggcgattatcgcaaccgcatggttaaaacagacactggcgacagatcagcgcggtttctgctcgtgttgtcgcctgcgcgcgcgacagatgcgcgcgtgattttcatccgcccactggacgagtttctgcattggctcaagaaatgactctcc

SEQ ID NO: 733 - DNA, 130 bp, Cronobacter sp.
  genomosp1
gttcgtgcctgtttcccgcctttttacgacaatatgtaaacccggccttgttgacggcagacctgctatttccaggtgtttttcagcagacgccttgcgcgttcaggttttattcgctcttgtggaggca

SEQ ID NO: 734 - DNA, 105 bp, Cronobacter sp.
  genomosp1
agagctaaataatgtgatcccggctgacaatgttcattgcgccgccgcgcggacaatgcgcctgcgtttctgctcttttccgcttcgcctgaacggtacgcgaca

SEQ ID NO: 735 - DNA, 202 bp, Cronobacter sp.
  genomosp1
ccgggcggcattatggctgtataaataaccagttaatgagagcgcggtaagcgtcgcaggaatgaacggcattccgggttgagcgagtcagagatgagaagccgggcgcacaggagaacaggatgacgaaaataccaggcaaccctgatgagatcgtgccgggagacataccgcgtccgatgctgacggattcggaagcggc

SEQ ID NO: 736 - DNA, 274 bp, Cronobacter sp.
  genomosp1
gtcaggatggattgatccgttaggccttaaagcatgtagtgacacaaaaaaacttcttcaacatgctgatgaagccagaaaatttattaactctcagcctcacagaaatatgactcttcgtcagctaaactctatccaacgttctctgaacagagcaattaatgcagaaaaattaggcaatatggctgaagcgttgaaacaccttagcatagcgattaccaaggaaagtatgtatgtaggacaaagaatggatgctgaatttaaagccagagtt

SEQ ID NO: 737 - DNA, 681 bp, Cronobacter sp.
  genomosp1
attcaagatatagtggtactggaataggtcttttttgggattaacattatgacaactcgtatcggtaaaatctggcctgcaaaaacacaaatcgaaaatgaatcatttgagggagaagattacactggcgtagatctaaattcacccatttttaaaagtgtaacgttccgtaattgtcgttttgaaaaaacaaaattctctgatggcagattataccattgtaactttgagaactgcgtttttataggtgtggatttacgcaatgtgactattggggctggcggtggtgtttatacgaattgtacatttactaagtgcgatttccgcaaaggatatttttatcagccagtaatgactggttgtttttttgatgaatgtaaattcaaaggcgctgattttaaagccagttgctttgaggactgtaaatttaaaggcaaactcgaagatgtcatctttcacggtaaatacgtgagtgatttaactgagggtgccggcatcaacactatgaaaaacatagatttttcactatccacatggaaagagatttgctttgatgactgtgatctttcatcttgcacaccgccggcgggtaaaacattcgatgaattgctttctccctctccatatcatagtgataaaaattatctatgctcagacattgtggagtaacaacaggcgtaa

SEQ ID NO: 738 - DNA, 112 bp, Cronobacter sp.
  genomosp1
ggcacggtcgcgagcggcgtcgagccggtcatcagggatcgcgttgccgtcatcggcaagtttcacccatgcgctggcgtcgtcgcggtgaaactcaacggtaaaatggcgt

SEQ ID NO: 739 - DNA, 329 bp, Cronobacter sp.
  genomosp1
aaccctttttggcattcttaaacgctgtgtaaatcacctccacatccaataaaccgcaggagccttcatgaagttattgttgccaacggtagcctggctgctgaccgtcatgctgataaccaaaagcctttatctgctcataccacccgcggcgcagtacccttttgcagaacgcatgggctactttggcgacgaaagcgtcatggacgctatcctctacacctttaccggcattgcagtgttaatcagttcactgctgtgtttctgcctgttgcgtcttcgtcgtcaccgataaatcgcacgccacaccactcccgcattactgccat

SEQ ID NO: 740 - DNA, 177 bp, Cronobacter sp.
  genomosp1
gcgtgttttccggtgtgctggcgcgccggaaaacattatctgcgccttttattttagcggcataataacctgtttgtttctgcggtttattattaattatttggtaagcaagtcagtgtattaatacacactcccgactcctggcttcctgtaatacgcgatcagcatggcttaaac

SEQ ID NO: 741 - DNA, 347 bp, Cronobacter sp.
  genomosp1
cgtccctggacgcctcttctcgtcacgccatgtcacctctgcgatgccgccttcctggcgggcatgagaagccgccagcgcacgttttctgttctgttaatcattacattctgctttcctgtgaaatatgacgaaatattacatcaatcttcagaatattaatttttcccttcacggaaatataacggttaataatcacactgccgtttcgtcatggacgataaaataataaaacaagcgaagcgcaaataaataaaaacagacctgaaaaagcccctttaatttaccataaaaacaggcatttcctgttcacaccttattttattgcttcacagacttgcagcatg

SEQ ID NO: 742 - DNA, 128 bp, Cronobacter sp.
  genomosp1
taatattaaactaatcctttggtataaagccacgtattatttatcgccaggcgatacgatctcaattaacggcgatgcgatggctgtgaataactttcctgttcagctcagtctctaccgcaccctct

SEQ ID NO: 743 - DNA, 372 bp, Cronobacter sp.
  genomosp1
cttttgggggtaggggttttaaacaaaaaagcctcatacgtaagcggggggctttttgtgtatctgtgctctgctgttaaatgcccttctgacaagaataactcgatcaggctcgaatgtgcgctgcacagtaataccccgacgagaaggccgcgcagaataccaatacccgccatcaaatccaccacttcccattatgtttattttctggcgctgcctgataaaagccttctgatacaggtctccctgctgctgagcaaatcgcaaccctcatccggccggcaacactctaaactccacctctgataatctgcatcttgctaccacctggaggcaggacatattcttctctgtagagtcactaaagccgtg

SEQ ID NO: 744 - DNA, 236 bp, Cronobacter sp.
  genomosp1
ttctgcaaaccaggctgatgaattgattgcggcgggacacagaagcgcggctcatgaatgccgccacgctccgtaatcttaagaaacagcctctgcgcgcaaccccggcctgataaatacggcttacagcactacctgtcaccgcaccagccccatatgcagacctccataaaaaagcctcagcgcgtctctgaggctttttccgacaggaaacgaggaatccctgaagagcgcgc

SEQ ID NO: 745 - DNA, 148 bp, Cronobacter sp.
  genomosp1
tccgctgtaatgcttcgtggctcccgaaaaaagcggataaatcgcacctcgcattatcgtagcgcgcactctccgccatgaaaaaaatccatcataaagcaaggtgttattgagtttattatttttggccgtatcgtttaataatgct

SEQ ID NO: 746 - DNA, 141 bp, Cronobacter sp.
  genomosp1
ccggcgcctgctcgttcaggcgccgcagagacgtaagacaaatcccgaactgtcgccggaacacggcttttagttcaatacgttgcaaaatggtaaccggatggaccctgccatctgctaccctgactttgcacttgctca

SEQ ID NO: 747 - DNA, 107 bp, Cronobacter sp.
  genomosp1
tcatggcttttgcgtctttgccagacttctctcgcccgcgtgactgccgggcattcctcatgaccctcaaaagtatgttgtaactaattaaggcgcagagacgcttt

SEQ ID NO: 748 - DNA, 144 bp, Cronobacter sp.
  genomosp1
caacaagatgaggggataaaacagagggaataatttaaaagcggacagcggacagcggacagcggacagcggacaaagataacagagaagaatacgcgcgtggcaacagccactgcgttcagcaggcgcagggcgcgtcaccgg

SEQ ID NO: 749 - DNA, 191 bp, Cronobacter sp.
  genomosp1
agggcgtgatgaagggtaaaaatatttaattacaaggagttagattttaaaagggattacaaaatgtaaatggcaaatgatatattcaaggatgtgtgatttgtatcacattataagcgcgtttaattccaaaaaagacgcgggggagtcaccacgagagtaagccgcgggcgcggccggcccttatcgac

SEQ ID NO: 750 - DNA, 173 bp, Cronobacter sp.
  genomosp1
tttatttcatcgataaagaactggcgacgctcgacgcccagccctgatgctatttctttttggggttttaattctccttcctgtttattcccgtttcttttttccccttctgttcgcgctgagccaggcgagttctggtcgcgccagaaaccgtaaagataaaattacagcct

SEQ ID NO: 751 - DNA, 135 bp, Cronobacter sp.
  genomosp1
gccggaacgggtttattagcgcaatgtgattatgatcaagttattgattaaagggaaactgactacagcgaatcagtgtctgaacaggaagcgccgataccgggagaaaggagagcaaagctatcagtagccaga

SEQ ID NO: 752 - DNA, 144 bp, Cronobacter sp.
  genomosp1
ttcgcgcggcgcagcgctgccgggcctttcagagaggtttgccgcctgcggcgtcgtttatatattcatttaacaaatatttcgcagtgaaatatgggccattattcctgctattaaatgcgctccaccagtggagaatccctc

SEQ ID NO: 753 - DNA, 202 bp, Cronobacter sp.
  genomosp1
ggcgacagacgaattaagagagtgtttcacggcggcagtttgtcgtgcgcaaacgccgcccctgcgggcgatgcactattttccggggcaattatgttgccattcatcttttttcctcccggcttgaatcatagatattcataataattaaaaatataaaatagagtatgtaaataattaaaataaaagaccgccgcaaata

SEQ ID NO: 754 - DNA, 1171 bp, Cronobacter sp.
  genomosp1
gctgctatcattaatagccatacgtccttgcaggtttaaaataatacaaccatcagatgcctgtgttgggtgcgctccgctgttaccatgtatcataaaaccatcacgcccgcacatctggttttcaatataaggtgtaagccgcattgtatatgctcttgtccgtggatgattgaatgcggggcctatagtgtaagtgcctctcggcaatggtcccctgttactgatacattcgtttgcagaatcattccagtattccggcctgcctgagtactcagcatcgaattgataagtaccgtccaggtagagcttatgcacgctgactttatatacccagggcattatgcggcctccttgctgttccattaatctgaataaagaatatttccatcgaggtagtgccacgtaatcttttcgtaggctaagtagaacgcttcaaggtggttgagtttctcgtaacgtgaaccctttatatccatcataaggggttcaacttcgtttacccttacgttctccattgtcaccctaaagtactcttcttcttgcccattgtgattgattcgatagaactttaagacagcttctttgaacttcctgcccgatgatacgccctgatacagataaggtgatgagctatccagctctttaattaagaaataatcaccatgcagacgtttactgacaaccttacctgtacgatcatctacaggtagctctactgtgtgcataaattcctggatttctatagcgccttcgcgaccttttacatccacggaacccttaacaagactgccactgtcatcctttagccataaataaaccggagttgccatcttttttccttgtcaaaatcaatccataaagaaagagttaactgtttgcagcaccacagcttgaaaaaaataatttccatgaattctgcaaactatctaagttcgagtttatgctcaactttttcattatccatttccattgtgtaacctctcttgtttttttgtgtatgtatgcttcacaacatggttaattacatgtttgatagatagcatataattcgccaggtgatatctatttatattcacaaaaaaaatgagtcatcataaatttataagatgcttcagtgccatttaaaaaagcttccaataatgccctcacaccaccaggcgtcaaacgc

SEQ ID NO: 755 - DNA, 195 bp, Cronobacter sp.
  genomosp1
taaatactgacgcgaattttgcgtctcaccgcaaggctggagcggcatatcagtgatataagcccaacgctgtcgcttcaacctgaagcagcgtgacgcctgcgatagtggtcgaggcgcgtatgtaacgaatacccttgagccaacccttacagggccattactgataacaggtgccttttgctaaaaggcacc

SEQ ID NO: 756 - DNA, 163 bp, Cronobacter sp.
  genomosp1
atgcatctctgtcatttccccctgtaaaacgccgcacgattgacccgccgcgtaacaaaacgctgtacgcatccccttctgaaaagattcaggagaaacgctgtctgattgttttaaaaatgcatcccatgcgtttatggtaaggatccattttcagataaga

SEQ ID NO: 757 - DNA, 275 bp, Cronobacter sp.
  genomosp1
ccgacgtcagattcaggcaggcctgacgctggctgaggccgctgctgaagccggttttgcagatcaaagccacatgactcgccagttcattaaaacgtttggcatctcgccgggacgctggcagaaatttatacacaacagtcatacctgagctgcacgatcgttcaagaccagcaccgcgggcttgttttatcctggatgcttctcaaccatagggagcgtcaccatgtattttcctgttaatctggaacagaaattttccctcttcgatgcgc

SEQ ID NO: 758 - DNA, 345 bp, Cronobacter sp.
  genomosp1
agaaacggaaatagtccgtggaagcgatgtaaaccgtgatggcattttctggcgtgacgcgttaaagggacattctctttacggtaaagggcaaaaaccttttattctgacatgacgcatccattctttttaacgtgtggcgagggaggtctcgtctggctgaaactgagaaattaacgcgctttacccggccctatatcaccctattctctgccggaatactgtattgctcattttacaatccgccttgtttacttttcagtaattaataatttcatgtgggtatcactattactgcgcgtgcgaagattgatttctcaggcggcttattatcatgcccgcgct

SEQ ID NO: 759 - DNA, 130 bp, Cronobacter sp.
  genomosp1
cctgtcccgccccgcttttcccgcacgttattcgcactccatgcattaatatcgctgatgattgcccgctgagcgcggtttgtttttacaggtatacggctactgcaccgcgcaccgcccctgcatgtgt

SEQ ID NO: 760 - DNA, 124 bp, Cronobacter sp.
  genomosp1
gtcgcgtaaaagcggcatatctgaagggataatcggatgaaacgctattttgattagggataattacaaccacttagccataaaaagtgtataaaaaaagcctctgatggtccaatgacccgca

SEQ ID NO: 761 - DNA, 301 bp, Cronobacter sp.
  genomosp1
tgatataaggcgccgtcgttgcgaatcaaacggccgcctggatatatagagatatatcgacaaaaatcgccgagactttaagggaaagcattccagagacagttttgtttaaataaattatatttttcaaactgttaattaatcgcgaaatacaatttatcttacttaagtgaaattaaactttcttcggataatagtaagtgcgggtaaaataaaggctttttcaccctcatcctcatcagcaatagctgatgttaaaaactattaaaacaagaggttattcttaacataaattttatgt

SEQ ID NO: 762 - DNA, 229 bp, Cronobacter sp.
  genomosp1
ggttgtattttttcttcctttctcctttctcctttctcctttctgaacgctttgggccgtatttcgttttgctgctaataatgccgcataagtgattatatttttcttatctgttgcctgattgattatttttatttgcgtaaattcttaacgtgccgccaaaaataaatgcgttactgcgtctctgcaaaaattaaagtgtgattcaaaacatgcttttcaggtgttc

SEQ ID NO: 763 - DNA, 136 bp, Cronobacter sp.
  genomosp1
atgcatcgcgaaagccccaccgcgggtgtcgttaatatagggcgataatgaggtagcccacgtcaggtttttttatttatctttctgatttttaatattttattaaatggtagtaaaagcgatgcgtatccctgta

SEQ ID NO: 764 - DNA, 102 bp, Cronobacter sp.
  genomosp1
ggcgcggtgggtgcgctttgcttacccatcctacaaaaacgcgcgacccttttcgctcgtggcgcgtagggcgggtaagcgcagcgcacccgccgtttacca

SEQ ID NO: 765 - DNA, 1864 bp, Cronobacter sp.
  genomosp1
caacctttggatagggaaggaaattatttctttcaaaaactattctttggaatagctaataaattgttttgagaatgagttaaaaaggtaacaatcgctatgctcattctcaaacttttccatgatatgttccgagattgccttacactgttcctcaagagaaaccatctcacttgcacgtattaatttttcaattttgatttcgtaatttaacaacgctagccaattatcatggtgtgtaaatttgcctgtagccgtaaaggcaagacaaacactaaatgatgagaaaatcaaaggtagcactacaaatacatttagttttttatcaaaatcaagttccccaataaaatcaggcgcagttagatgcaaaaatctatcatctgctggagcatgattaattaaagaatacattctttctatctgctcacctttgtcaagaagctcgtttatacttatcttgcaaattttgtttgctctgaaataggacgcaatttgcatcatccgcgaggccgacagctctgttttaaccatttcattaattagctcatgatttgtaatggagttgctattaacgtcaaatacttgtttcttgccctcgcttgttttaagtgtgacttttactttattaaaaggagagtgaaacattctcatcaataaaaggacgtctcttaaatcagctatatcaataggtttatcataagagataaaatccatgtttaatgttggctttcttatataaacctttgcgtcaaaaaaatcagtattgactctaaaaaaagctagttcgtctgccgcatttagtacgataggcgagaaataaaatttacagtcaaaacaaacctcatctatctcactttcaaaattaatagttccagaaaataattctttaacttcatcaaactctattatagcctcattgcttgtgagctcatcatttttcattgccaggctaaatcgttgctcccaagcttcaatatcttttatcttaactttagtagggtaacctaatgacgcttgcattaaattgttatagtcttcctttgtggcaattttaaagtttatcttataacgctctgcttcatatcccagtgagcttaatagctctagtttatttttacaatagctggcgattccggaggggatatatttttcaatggcacttcttattgcatatttatccgccagaagaatctcatcttcttcactataacttactctatagctaattttgtgcagcgactttctagcgccaacgtcattttcacgtattttttttaatacgtcgtacatcatcttatcatcgacatgaacaagaaaagctgacaccaaatttattccgccactgtatttggcaaaaaagaaaaaacaaggcaaggatgaatcacaaaaccttttcatattggagagtttgacttggacactattgctctcaccatccgtcgcttttacttgtataaagcactgtataggttgcgtatctaacgtgtttaattgagtgatattattttctaacggaaattcaacaatggcgtcccatccagcagcatcttcctgcaaagaactattaacaatcaattcagccaaattgcataacttgtcaaagtcggccttgcctatattacctacttttctggcgctcataagaatccccattcatttacacgaatagaaatcatatcttaatctattttgaagatgaaggtggaagagggtaagtgatccaattcatagtctaatgattgagtagttttttgcgttccatcacatactcccaagaaccaccgtacactccttcacgacccgcctccttgactgctccgccacaacgaggcactgatgttagttatctcaaatcatgcacacc

SEQ ID NO: 766 - DNA, 1058 bp, Cronobacter sp.
  genomosp1
ccgaagattcaccccagggctggggtgatagaattatcagaacatatgaagataaatgcaaattcatgtactaaggagatgcaactagttaatattaaatccaattctaccattgactatgacgctattgctaaaaactaaattgccaacccttaaccgatcagcgttaccaaacaatcgaacgccccgaattagcatgtcgaaccgtttgattatcaatttcttaggtggttccactaacagcactaaacgcggccctcggtttttttcaataacacttatctcagggccaataacagtgatatcccaacttccagtaccgcatacccattcattcctaattatttctaatgaaagtttccctttgctatcataaaatctcccagaaataagtatcgcatcgtcttctttttctacttgcaataacggctcaccttcgaacataactggtatttgacagttgataaaagtctgccctgcaaattggatcaagggctcatcatcagaaaagtctagcttatcagtgatttttccaattttcagtgccgcaggctcaagcatggccttcttaatcttctctttcgaatagatgcgccgggtaacttttgcgtgacacgttgggcaaaggagagtaatcgcatctggcgagtgctctttcgctagtgcaaaagtgggctctacatgttcatactcaacgattggagatgcacaaacaacacagccaaaaccacatttttgcctaacttgcctttttacctccgcggggatggttctcgacaaaccatatttattgaactctcccatactgcaacctccagttttattatgtttatatatcatcccgttaaaatcattctactcaaaggaagtacaggcagaatgtgacgaatatcattttaggaggttaaaaattttttaataaaacaactttaaaagtgagggaagtacatatccctagctttattgcctaatttttattgcactttgaactgaaaccttcattaaagtgcccgaattgtggtccttttcaagtctggtcatttaaccttccctagtta

SEQ ID NO: 767 - DNA, 2498 bp, Cronobacter sp.
  genomosp1
cttttttacccattgcctaacgcctcgctttgctcgttgttcaacgcctacactacgccagcactggcgcggcggcacataagagttttacagcgacgcatgcaaacaaatgcatctgatgtatgcatctatctaattagtgctcacgcccattaaatgtgagtttacttatccttaatgcgtactaaaaagcggtaaaatttactcactgcatacacgctgagaaccccgataagtattgacaacacaccaatgaaaattatcgccgtcaggaaagggcttaataatccccccaaacttgtaaggtctccaagacttgcaagcgtatcatttggaaccttccttaagataatctccggaattattagaagcgcaataatcgcagctataacgtaaatgagtattttacgactttttttcatcttcatccttgctcctgcgagcgaccatgatcaatcattaaccataaatgttacaacaaggcacatggaaatggcagaaaactatctcaaattgaaagcgcagtcagatcaaagactggcaattgctctaaccaaagctgtgaaggaggtgtatgccacccacatgcaaaccgtcgaagacgttaagcttggcagccagcgtattattaactatggctcatgtgtgatgcctgacaaatactacaggagcacatgccatgagcaatggggtgaagataaacgtttgtatttgtctgtgctggaaatttataaaagaaacgacgttgttttagacatggtccaactttatttccagaaagcctttaagcgtctcggagacgaaaaaagtaacacccttgtatcttacataaagcaaaaaatcggtgagaaagcatatgaatcagctgaacgttcgagcaaaatggctctttcattgacaattgccaaattaattgtaagcagtggcaagtttcaggagtcatacattcaaaaagttaatgaaatgtccagctggcttattaaagtagtgaccatttattctaaggctgaggtggcagcactggctgcgaacaaacttaaatttcaggatgcagcatattaccagatactctttcgtgaaaagatagaaatgctatatttccttatcgaaccacaaatgtcaaagataatatatcaagttgaatcgggagggaataacgaagaagttattggtgatgctttatatgaaatgctaaaaagatgaagaaattattaacctttttgtgggcggcgcattctcacttggtcccaattgcaattatacttgcaggggcctttttgtttatttatttcattgaggagtattcaggagtacttactttcttatggttcattatcgttacatttatctacatcaaatacaaccgctggtattgatggtgaactgattcgcgcctcgcctgaccgcttcatgggtcggtgaaaatgcaggtgcattaccccgaagattcaccccagggctggggtgatagaattatcagaacatatgaagataaatgcaaattcatgtactaaggagatgcaactagttaatattaaatccaattctaccattgactatgacgctattgctaaaaactaaattgccaacccttaaccgatcagcgttaccaaacaatcgaacgccccgaattagcatgtcgaaccgtttgattatcaatttcttaggtggttccactaacagcactaaacgcggccctcggtttttttcaataacacttatctcagggccaataacagtgatatcccaacttccagtaccgcatacccattcattcctaattatttctaatgaaagtttccctttgctatcataaaatctcccagaaataagtatcgcatcgtcttctttttctacttgcaataacggctcaccttcgaacataactggtatttgacagttgataaaagtctgccctgcaaattggatcaagggctcatcatcagaaaagtctagcttatcagtgatttttccaattttcagtgccgcaggctcaagcatggccttcttaatcttctctttcgaatagatgcgccgggtaacttttgcgtgacacgttgggcaaaggagagtaatcgcatctggcgagtgctctttcgctagtgcaaaagtgggctctacatgttcatactcaacgattggagatgcacaaacaacacagccaaaaccacatttttgcctaacttgcctttttacctccgcggggatggttctcgacaaaccatatttattgaactctcccatactgcaacctccagttttattatgtttatatatcatcccgttaaaatcattctactcaaaggaagtacaggcagaatgtgacgaatatcattttaggaggttaaaaattttttaataaaacaactttaaaagtgagggaagtacatatccctagctttattgcctaatttttattgcactttgaactgaaaccttcattaaagtgcccgaattgtggtccttttcaagtctggtcatttaaccttccctagtta

SEQ ID NO: 768 - DNA, 1849 bp, Cronobacter sp.
  genomosp1
cttttacaacgcagtatgtctctttgcggcccctcagttcagacaggaaaggttgtatggcctgtcgatgcacatgaaacaatataccagaaagggtctgctattcttttctccgggcgctaccgtgtcttgtcagaaaagtacatactgctttgccttcaagtgtaatctctctctgccaggtgctacaatctttctcataatctgagttttttcttataaaaataaaataccgatactgggaaagtaatgagcaatttaaaaaatagaaacttaaccttattaaaagatgctttaaaaaaagaagtcatgatgagtgacaaagcctttacgtggactcgtgttatacataaagccatcaaatgcccaaagcgacgctactatttctggtggcgcctggcatcttactggcatcaaaacaatacgtatggcatgaagaaaatggcatcgcgtataaacagaaaattaatctccagatacggtactgaaatcgatctggacgctaaaatagggccgggcctcgttatcactcatcatcacggaatagttatcaatggggctgccattattggaaaggcttttcggatcagacaaaatacaacgattgggataactggcagcaataccagtaatacgccggtctctattgtgattggcgataacgtcagcattggcgccagttcatgcattattgccgatcaaataagcatcgggaacaatgttgttatcggagctatgtcttttatcaataaagacatccctgataactgtacggtcgtcaccgaaaagacaactataatcaaacagtggtgaacctggttcagccagcggatgctttacgcgctggcttctattaaaatgagtcattaagagcatttactgtaaatccgcggaggcaatcgtattgataaaataagccatccgcgcctcgtcaactaacctctacagagcgcttttacatcagccaggcacggacgcagaaaaaaccataacaatcagcgcctgctatttcttgctcagtttagcgctgaacaatctcattagattttcgggtataaacctggcaattatcagggatatctttattaataaagctcatcgcgccgaccgtcacattatcgccaatcgttagcgcgtcaccgatgacacagctgttcgatcccagataaaaattatctcctatgataattttccctgccccccctttaccactattaccgataacgcagttctgggtcagtttcatattttttccggccacaacccgtttggagacaacaaccccaacatggtgagcgatagtcaacccttctccgatagtggcgcccagcataatatcgcaggcaaacctaccctttatccgggaatgaatacggtacgccagacgtcggctgccgttctcgtacagataactcgccagtcgccaccagaaaacatacttaaggcccggtttattacgtaaccgcgacataagccgcagatatgaaaactttttgttgaggccaataatctcgacatgccagaaacgctttaattgtgaaaatttcatttagttttaatacgcaaacagaagaagcagagcacgtctggcaattgtacacggctattggcaacgggtctgcacaaccttgcatatctcctggcgaagggcgtggtataacgagtttctgacaggcatggcttcaacgcttcatccgccaggctgcaaaaaataatatatgttgtgatgagttaaatctcaaacccctggcgcgattaaggcgcgttgatcctgttaacgctgtcactctcgttccgcctttattattcattgccacgcatgttccatcagaaccctgtgagccactcc

SEQ ID NO: 769 - DNA, 661 bp, Cronobacter sp.
  genomosp1
gctcaagagcgtcaaaaaaattcaataagattgatgacaataaaatatatcggacaagaaaccttcagaatatatgttaaaaaaataagttaagtcaggtaataaagtgaaaaagtaatcacttaagcgcaatttactgcggcttaaccaggcgatactggctttatctttaacgtaaatatttgtggcagattaagagtgatttttgagcctatttttaattacatgattaataaaccattttattttcaaaaaaattttaaattctcctgtctttcattaagcagtgcttaatacgtatttagcagcagttaataatcacgttgttttgtaatggtgcgcacaaaataaacgggtagttcaccagaattgaaagtgatacgggtatcacagaagaataatgatcaacgtcaaaatatatcatgtatgattaatcaatcagagaatatattaaccaccggcaactatttcattattcagcctggtcttacggcaggcagaggtattattcgccacaaaagccgccgccctctggcagcgtgtccgtttgctggttaataccgccggtttatcaaccgccgcctgttatctgcgctacctcctctcccgcgcgcctcgcgcccgtgactgtcgtcacaaaacccccaccgctcggggcctc

SEQ ID NO: 770 - DNA, 318 bp, Cronobacter sp.
  genomosp1
gggtatttttaaccgtaactatgccgagaatgttatctctgccggcactattattaacaacggcaccatcagcggcacttatggtatttatacatcaaattataatactcaagcggaagccgccacgctgattaacaccggcaccattaccggcaacagctacggcatttatatcgatggcagtaacggcgctaaaaatgccattaccaatagcggcgccattaccagcaataacaatgctatttatatcaggggcgccagcgattccacgctgacggtcactaacagcggcgtcatcgaaggcaatattacgtcggt

SEQ ID NO: 771 - DNA, 148 bp, Cronobacter sp.
  genomosp1
cccagcccatgaacgaaatgacattaatcgactgaaaaataaattaaaaatgcattagtgagataattaaagccggttgagagatgacattatttattaatgcaacgtcattcatttttcatgatttccctcaacaccagaattatta

SEQ ID NO: 772 - DNA, 111 bp, Cronobacter sp.
  genomosp1
gaaatgcccgaaaaaatataatttctcgttgcgaaatataattataaaaataactcaggaaaatagaagccggtcgatatcggattagcggaatatccttaaaggcgaaat

SEQ ID NO: 773 - DNA, 102 bp, Cronobacter sp.
  genomosp1
agagggctataccgtgcgcggacaggcatgatgaaaggccccgtggcggtaaacgcgtgctggctgaaacgtctgccgcgtgtaggcaggcagaaaacgtcg

SEQ ID NO: 774 - DNA, 146 bp, Cronobacter sp.
  genomosp1
gaggcccccgggaaagattagtgatggtgatattcaggtgtcggagccggggctggagccggagatggattcggtaccggtgtatggccaccgttatcatccgggtgcggcgtcgggacgtcatccggaatgtaatcgggagtaat

SEQ ID NO: 775 - DNA, 429 bp, Cronobacter sp.
  genomosp1
tctgctggttttcatttttcgtccttatgatttcacaataatttataattggtatttatgccttgccgatgagttgttccctcaatggatgggcttcgcaattataagccactgggggatttaaataagggatatgaattaatttaagatatgtgatcgctattattaagaatggttttctgacttttacgaaaaattagtctgtgtatcgccactgaaatagacctgttctttttaaaagccatccaaaaatagacacaccttatttttattaatcaaaaaaacagaaaaggaaaatacttaacgaataatttgcgaatttcaaaggaaaaaagatccgaccgtgcagcagtcttacctgctgcactttccgtcgtattagcagagtggtgtctgactctcaagtcggacttgctccggcaatagccc

SEQ ID NO: 776 - DNA, 253 bp, Cronobacter sp.
  genomosp1
tgatgttcttgcagaaatcattttcacaatgaatattcaagaacgagataagccgttaaaacatccactaataaacagccaatgcattattaagcgaacaaaataaacagcggccggtttagtatcggcagtataaacaagatccataaaacatattaacgtctgccagaaacagcataataaaatctattacaattttttgattaatacttaagaaaagccgcaaaatgaaggccgggaagatagcataaga

SEQ ID NO: 777 - DNA, 181 bp, Cronobacter sp.
  genomosp1
cgcctgtatgccctgaattgttttactggaaaaccatacgcattgatgaaagaagacggttgtactgcgttgtgcaaagcgtattttgcgagttcttaagtgagggtactactgcaggggagaaaaatgttaacgatatggatattgggatatgtgctgcttaacgccgtgctcatggtaa

SEQ ID NO: 778 - DNA, 126 bp, Cronobacter sp.
  genomosp1
cacggacgatgttgagggcgtccgccagcagtcaggtagggtgggtaagcgtggcgcacccaccggcccctgaaacacgataacttcttcatttgaccaggcccacacgctgacaaaaaccgtcaa

SEQ ID NO: 779 - DNA, 126 bp, Cronobacter sp.; identical to SEQ ID NO: 778
  genomosp1

SEQ ID NO: 780 - DNA, 100 bp, Cronobacter sp.
  genomosp1
accacacccgcgccagcgcgttttgcatcgcgctttccggcgtgttggccgcctctggcggccatcgaacatcgccacgccaatgcttgccggccctgta

SEQ ID NO: 781 - DNA, 227 bp, Cronobacter sp.
  genomosp1
taaccagtattagcaatagcaatccttttcttaaagtagttctaatctcgggcaacatacggcttccttgctcaacgctgtgataactataagctgcggcctgtcaatatatctgaatttcaaaagaaccttggcaacactttacttaatatgattatattatcataattcattcttctttcttattgcactcaggaatcgagaaaatataaaggctgctactcctg

SEQ ID NO: 782 - DNA, 1775 bp, Cronobacter sp.
  genomosp1
gcatactcttgtgaataaagaccggtttaaatccggtctttcaatcagcctttatcagcagcctgatttcatctgcatgccgcttgttaagggtgatttcgcactgatcgatgtaggcaggataatcgtaagcatcttcgttaatctctgttgcaaccgcttcacagagttgatcccggtactgcttccacactgcctgcgccttgagaaaccgctgattaaaaacgtcacccgccgtgaggcccgcgtcttgcttaccattaaaatcgccaggattgttagcgagaatatttttactggcgcgcgcaatcagtgcatccagttccctcgcactttctacttttttctttgccagacaattgtatccttccgcaacggaagcactctgcctgaaacaatgctcgcgctccggcccctcgcttaatgaggcataacaggaagcaggaagcagaaaaaaacaagccaaagccgtaatacgtttcactgggattttcttcgttaaagatttcatctgcctgtcgacacgctgttataagggttaatcgttgaaagggtagactgtttaaaagcataacgaaacttattcttttaaataagccagtcgctttcgggtcggctcaaatgacatataaattgcatcctgcctaatgtaccgggcaagtttctctttgccgcccactgccgctttaaagagggcagtgacgctatgcgctccctgaaaaaagatatcgacgaccacatccctgatttttttatcgagagatgcccatcctggcgcgccgggaatatcgggagccagcttttcataaagcctgcgcgcctcgtcagccttcttctgataagaaatcttaaaaagctggacttgctggatatggctgatttcgcccacaaaggggccatagattctgataaaatccaccgcagcatctcctttacgaaaggcggcctttgaacacaggaccgctttgtactcttcgatacctgcctgacgcaaggtagcaaaaatttcgccgctgcttcgattacccatatcatagcctcggcctaatgtgacgccagatcccacagtgcccggcgtatgtaatactcttgaaaaataagggtaggtatttcttcccctgaaaggagcagcggttttgatgtaatcgataccttcagcatcaaaggtcagttgtccttcattaactatcagaatcccacttttttgtactggtaatgaacctggtgacgctgcgttattaatcgccatcataaaccagttatccattggctgaactaacccggaaggtgaaagatttaataaccgttgataccagcagatagcctcaatagtctcatgattgcagatactgtcagcgcctatgctccgcccggtaaaaaacgtgtaacctgatttatttatcgccgtttttaacagcctcacgtcttccggattattcgttccacaaaaccctacaggagctgacagacggaatattttcggattactgtaataaaccccgccattttttgaagctattcctttttgcatataatccctttatattttttggaaactctgaaaaagacattaatcaaaccgattcgttataaatagatctttatggggatattgggtatagccagagctggcaattaggaatacgtttaattgatggaagaatcacatatcgatcttaaacaaccaacaaacctggcagaatattaattcctgcacctgtttaatagatggttacgtattagctcagtctgagaaggagggttgcacagaatca

SEQ ID NO: 783 - DNA, 129 bp, Cronobacter sp.
  genomosp1
cccgtaaggtgcgctacctgaccgatgaagaaaaatctcaggggaaaataggcagaataagccgtgaaaggccagctaataaaatataccgctgccttaacgaatattatcccactcatagactttacc

SEQ ID NO: 784 - DNA, 1100 bp, Cronobacter sp.
  genomosp1
ttatctctcttttctatgaagaccggactttttaatcgcgtccttcctcttcccgcctcgcatgttttgactctgatatgtatatatggcgccacaaaaattcacacaatgaataacattctttaacccgcccctttcacttttttttataaacgcctgcttataaaaaatatcaacgttatcttgtacattcataatgcaatgactacggcaattaaatccttctaaaaaagaaaaggaatttatatttaaataaagtcttctgatacacacattgatgatgataaaagtagctgtaatattcatgaagaaaataatgcataagcattttctttattaatattgaggagcacaattaatcaagaaagatccaccctacacctccaataatttaaacccagggtattttcatttaccctaaagtacgtatggatctgtacataagttttattgtgggagtcactttaaagtgcctcctgaaaaaggattgtttatcatgaaaaaaatcacatcagccctggcgctgagcactcttttactcgctggttttgcacaagcagaaaccaatgatgtcgcagctacagttgcgatttcaggcaccgttcaaacagcaacgcctggctgtactgtcgaatttgtcgaaccgacggtagatattggtagtcgtactattagttctttgccattccagggacacaatgtcaataaagcacagatcagagaagttactgccaagttggtgggtaattgcactgatgaaggacagctggtcgctaatgtttcctttaccgggccagtcgccaatgcagagggcgatgctctgatgaatatggccacgggttctggcgccgctacagggctaggcgtaggtatttacagccttgctggtaatgtcattatccctgacggtagattaataccaggaaccggcaccgataaaacaatcttctacgttggtatggtcaaactgaacggtgcaacgccgaccgcaggtaaagtgcagtcttctttaaccatgcaggttgagtctctgtaatcattttaaaagtaataaaacccgttgatatgtatttatcatcgggttattcctcactacaggt

SEQ ID NO: 785 - DNA, 227 bp, Cronobacter sp.
  genomosp1
agagcgcccggcaaaaaatgtgggtatcgagatgttatttaacggcgtggtcatgcgtcctgactctccgttagatctatcgttacctaatcaaaatagctatgccttgccgctctctgtacgttacgccaaaacgggcgacaacttaacgggcggaaacgtcaaagcacaaataacgctgagaataaattacctctaacatcggggtggcagttacgtcttgttat

SEQ ID NO: 786 - DNA, 294 bp, Cronobacter sp.
  genomosp1
gcgatacgttgctcgtcccggatgctaccggaaaaactgttttcggtatccaggctgtgaaattaactaatcagaccgtgtcgccgggtacgctttacggcagtctcattgtccagattgagcgcctttaacagactttcccctctcctgcgggagaggggaaatcgacaccacccaggccttttcagatcctctttgaacacgccttcctgactcatcaatgagtgctatccgccggacgatatgcctcgctttacctggtggtctccagtcttcgcggcgtcgctaagcata

SEQ ID NO: 787 - DNA, 103 bp, Cronobacter sp.
  genomosp1
ccacctctgataagactcgcccgcgaccatagcgcgcgggcaaaaggagaaaaataatgagtcagatcgctaccgaaccgactatcgcgcggttgccactgaa

SEQ ID NO: 788 - DNA, 202 bp, Cronobacter sp.
  genomosp1
aataaactctcataaatattcacctaaaaatattgcgagaatgaaagaaggcttggcacctaaaatgcgagttgaagtaattaatcgtaaaacgggcatggctgaaatcagagatgtatctttggaaatacatcatagaagtttgccacaaagacttaaaacttcaaaggtgaatgagccttggaacttggaaaaagcggct

SEQ ID NO: 789 - DNA, 882 bp, Cronobacter sp.
  genomosp1
gtgaaacaacttctaaaaaatggattcaggcattcgagagagaacatggggatgctggtattcatggtcttcgaagacatggggctggtactacattggaacagcaaaaatatagggctactacgggttatacacctgatgctgtgcctgggcgtcctgtggatgctacacgattccttacgtatcaagaccatcagcaagcaattgagagagcattaaaagagtatgatcctaaaattcatacgaatggcaaagtagattttgatatgccccagactgtagctgaaggttataagatgggtggtgaggaatattttagcacaaggagagttcgtgcaagttttaatacgaagacagggaaaatgtatagtatatttggaattgcggagtaaatatgaaaaaaattagcaatagttacgtttcaatggtttggcagtcgcttgctgaagaccccaatatggatagctcttttatagggttgaacctatctaatgaagaaagcttggatttagtattaaaaggcttaataaagccatcatatgataatcttccaccctttattaaggatagatgcaaaaatagctttgcatatgcaataagcttttatgatgaaaagcaactcaagcgtctttatgagtcagcgatcccagtatttgatccaccaagtaaaattagtatgagggagttctatattattgtttgggatattctttttcctggggaggatttcatgataaataaccctgatgattatattgaagtggcttttggtgatttgtataagaaatagttttagaagaagatgatagtaatataataacctattatatcgacgcaatcattaactgtaatcatcaagagctttgctcgtaatacgtgcat

SEQ ID NO: 790 - DNA, 119 bp, Cronobacter sp.
  genomosp1
tctgtagtgttttaatgcgtaatatttgtggcggcgcccggcatacagccgtttccggcgataaccggaactggctgattattttagtgaaatgcggtggcgctatttacgcgcatggc

SEQ ID NO: 791 - DNA, 546 bp, Cronobacter sp.
  genomosp1
ccggcacaagcagccagcccgcagcacgatatggcgctgtaagcacgattgcatgggcgctggcgctgttaatggtcactgtaagataaacgcttaacgactcacccccctcacgtccgtcacaccagggtttgctctttactttccattcaaataaataatcaataataaagataatgccctgcgataattattgcccattggggttttcttattgccagggtaatagcgctttccttttttatttcttactgaaattgcgtcttcctgatatttaggaaatcggcccggtattttccagatgattatttttaaaggtgttttcagagtgaatcggcttattcatagaggctgttagaggtccgtctattgttacgtgacggatgctttttataatgcacacatcattgtggcgctgttaataaccactctcgttaaaacaggtacgatcgctacccataacgattaataacagcgtaacgttcagcgctggcggtaaataagcgcgccatagtcacccttagcgcgatgtttaacgatggtggc

SEQ ID NO: 792 - DNA, 143 bp, Cronobacter sp.
  genomosp1
acctctgcgttttatttctccttctgtttttatttttcttcaacctttctcattgtctgtttcatatctctcaccgtaatcccgatcacaaagttcgtttatcctggttaatctgtttctttactaatcatcaatgccacctc

SEQ ID NO: 793 - DNA, 165 bp, Cronobacter sp.
  genomosp1
tgacgttatctttcccgttgagtaaagcaaaagaatgagaaaggcctctggaaaccataaatcgagaatggttcctggcgcaggtaaggcatccatacattcttgtgccgggtaaatgttggtcgctagcgtgatttcttgctttcagcatctctcagtttcatt

SEQ ID NO: 794 - DNA, 133 bp, Cronobacter sp.
  genomosp1
atacccaccgatactcttcgcttctttacccttaatattcttctgcatccgaatgccgctttttcattgtcctgcgactcgccgcgccggcagaaaccatgttttcctctttactctggggtataaaattaaa

SEQ ID NO: 795 - DNA, 103 bp, Cronobacter sp.
  genomosp1
tacgaagataatcacaaataaacgcgttttcgccagcggcgcggtcgctgctggcgtgaggatcagcccgacgcgttttcttctgctgcggcggctggttggg

SEQ ID NO: 796 - DNA, 194 bp, Cronobacter sp.
  genomosp1
cgcccgggacacgatccgtggttcattgtgggttatcacgaagggacgccatacaagaaagagaaagcgggaaggcgttacaggaaattttaccgacgcgacgttcataaagcgtggtaataaaagcggaaacttttgggtcgcgctggactgacatatgcgccagcgcacgactggcgtgcgcgtagggttcc

SEQ ID NO: 797 - DNA, 157 bp, Cronobacter sp.
  genomosp1
tgttttgtttatggcgtgagcccgcccgccgtgccgtgaatgttttgcccctccttgtggctcatgcctcccttatagcgatgaaaaactaacgtgctgcgccagaccgcgttgactcatcaacacgctgccatactgcggcactccagcgaaatgc

SEQ ID NO: 798 - DNA, 154 bp, Cronobacter sp.
  genomosp1
tattgcgctccttgcagggcatacgcaggaagaagcgcgggaagcggggttgcggctctgcgggtgtcccgcccggcttccgataacgctcaacgacgagagtctgcaagtgacggttacgggcggtttaacaggcataaggcgggacgagacg

SEQ ID NO: 799 - DNA, 302 bp, Cronobacter sp.
  genomosp1
ataaatgccatattgatataacagatgacaagcttcgacagcgtgttcagtcaggttatacaggttgccgtaagacgggaacagcgtcgacctggcttaatgcagaggtgatgtggaaaacggtaggtggagcgattcaggaattttgccgcgaaccagagccaactgacaatttcgtcattttagaaccccagatggaaggaagtgcctcggatatcgttggcagaggttatcgtaaaagtggcttctttaatatcaagggtgacggaaaggctcttgttattatgttaagaaaaaatgat

SEQ ID NO: 800 - DNA, 123 bp, Cronobacter sp.
  genomosp1
ttcgttctgaacgtttctgcgtcatcagcccctgtcgctcacgcggcgggggcttttttttatggcgggtattccacgcgccttttttttttttatggcgggtattccacgcgcaggcgcttt

SEQ ID NO: 801 - DNA, 115 bp, Cronobacter sp.
  genomosp1
tgcgggttatgggcgcgcatggcgtggacggggcgctgtcacgatgctttaaaagagggacgcggtcagtattcattattaatagtaataattaatcgcgtatagacaacatggc

SEQ ID NO: 802 - DNA, 104 bp, Cronobacter sp.
  genomosp1
gcttacatttatgccctgggtgcgcagaatctatattgtcgtcgacggacatcagctgcaatgggcggccgggatcgcgaaagtgaaagtcatcccgcatgagg

SEQ ID NO: 803 - DNA, 274 bp, Cronobacter sp.
  genomosp1
tgaataatacaaatgaacgtctggtcgtcattatgcccacctggcgacaaacaattgtcgggccggtaactggtgatggggaggcaagagcccttaaccctctctttatgcaaacggattttgccaaaagctggtatagcatccttcattcgccattattaaaaaaatatgctgagcgatacgcttttaaagtggcttttttccctcatgctaatattcagccttatctgtctcattttgaggtgcccgattatattgaggtgattacacactc

SEQ ID NO: 804 - DNA, 313 bp, Cronobacter sp.
  genomosp1
tgcttcactctcaccatattatattgcgccaggcgaacggggccggcgcaatatagcctcaggtttttcctggcctgcaaataacctcttgtacaaaaaataaacgtaacgaaattacagcgctgtttttacttactcgttttgcgttattccgcgtgcggttttactgacgagccattgtccgcacctgaagccatcgccagcgctcagtctgatttacgtcattttttatctgcgctgctatatttgagagtgatcaggcacgctggctgtaggcgcaaattcacagcgatattcttatatggcgctttca

SEQ ID NO: 805 - DNA, 116 bp, Cronobacter sp.
  genomosp1
attgacgtgcaaatcccatcgataagggttgtacaggcctgccgggaagtaatcattttgtgaaaagttgtacacaaacccctctgagcttctgccgacaatactcatttttgacg

SEQ ID NO: 806 - DNA, 234 bp, Cronobacter sp.
  genomosp1
ggaaccggaaacggcgagggtgttttcgtttttaaccgtggcgagcaacgcaagcgcctgctgcaaatcagcgctgaattcctgctgtccgttcgcgccgcgcgacgaaaccacgaccccagcctcagcgcgaattttctctataaaatagagcagattcacgcccgatttctgtaatgcctcgctgttacgcagcgcttgagtgacctcgtcaaacacaggctgctcgttcgc

SEQ ID NO: 807 - DNA, 254 bp, Cronobacter sp.
  genomosp1
ataaaaaaatatgcagaatatattttcagttatttttatatatctttacaatcaggcggttggctatttttagggtttaataactgtgagccgcttaacaattaaaaaagccgagcggttaaccttatgatactttgcgtaaaaaccataagcctgctcagaatataaaggaacgcattttttattagcaggctaattcatgcgcagcgcgttgtgtttaaaaaagcttttgctgacaagtggcgctaaacctg

SEQ ID NO: 808 - DNA, 119 bp, Cronobacter sp.
  genomosp1
gagcggggtttttttcagtctgctgaaagaaagtctgtgtggtgaaagcgtgagggggagaggggcactgcgggtaaacgccgacggcgctatcctgcgcgtcgcgccgggtgcgtgtc

SEQ ID NO: 809 - DNA, 100 bp, Cronobacter sp.
  genomosp1
gtggatgtgcgctttagcgttatatcatcaaaaaaaaaaaaaaaaaaaaaaaaaaaaaaaaaaaaacaagattgttttataacgtattatttcaaataaa

SEQ ID NO: 810 - DNA, 184 bp, Cronobacter sp.
  genomosp1
ttttttcacccggcaaaccagacgtaaaacaagattgttttataacgtattatttcaaataaaacgcagcggtaaacgctatgataatttttccttattaatgttaatcaatgtcattatgcgtttgctgttgctcaagccgcgtttttttgtgagctacggcacatttaattttttttgcagc

SEQ ID NO: 811 - DNA, 224 bp, Cronobacter sp.
  genomosp1
atcggtttctttcattattttatcgtctctttttctgcttacatttactgatactatcctgacaatatcttcataattgcttaactcagattaataaaagcgctttctgagaggctttaaaacggtgttttaaataaaaggaataaacaaagagattcattaacgctgccagatatttcaccatagtggtgaaaatatcatcatttaagcgcatgaattaagag

SEQ ID NO: 812 - DNA, 196 bp, Cronobacter sp.
  genomosp1
ccgttatcgatagcacgttaaacctgcttcagtttcatctcgggttagcggcgacacgtattggtaagcggtgaaaatttcgcctgccgcttcacgctatcataaccgctacgttcggcgtcatagtttaaatggatgacgcgacatcgcgcttttctgacagctacgccggtgatttccctgtcgcgccgggcat

SEQ ID NO: 813 - DNA, 184 bp, Cronobacter sp.
  genomosp1
gctgttcatacgctttttcgtaggcccatgattcacaaaatattaaatttatttaagtaaatggcctgtgaattgtgcgggaataaaaatggctgcttttacatgttcatcacaccggtttgctctatggtttatgtcagaaggcgatagccagtacactcctggaggccattgtgatcaccct

SEQ ID NO: 814 - DNA, 209 bp, Cronobacter sp.
  genomosp1
tgtaatggttcagaaccgcgtggcggctgccggtgcaaaagcacgtcgcccatatgtatgttgtaactagtagtggtttttttaatagctttcaccccacaaagagcagtacagaaaaggccacttacgtagcggcgcgttcgccttatctaaagaaatacaaaactaatagctaccacgatcgccttgctcatctttaacgcttccgt

SEQ ID NO: 815 - DNA, 199 bp, Cronobacter sp.
  genomosp1
cacgggaataatagtgatgtcagttaacgggcacggcttacccgacgccgcgggagtcacatcccggcgtttttatcttttctttctgcacgttacgattacaacagcgtctcgttgactaccccgttatgtttctggatctcacgccgcctttcagacataacaagaaagtgtggcgcgcttaacatcagaaaccatt

SEQ ID NO: 816 - DNA, 121 bp, Cronobacter sp.
  genomosp1
accacaataaagaggtaatttgttcggttatttttttaaagtgattcatgtcgacgtaaacggcaacgtgcgccaaacggaaaaaaccctgccggagcagggttgtcagaggaaagaaggc

SEQ ID NO: 817 - DNA, 133 bp, Cronobacter sp.
  genomosp1
ctggcgcgtggtttactgaagatgaatttacaggggcaaattaatttaagagtgaaaaccgcaatgtatggatcaggtcaaatcgccagtcactattttattaacgactgcccggtttattgataaacagaat

SEQ ID NO: 818 - DNA, 260 bp, Cronobacter sp.
  genomosp1
gcggccttttttattgccggtttcagaagatgtctcgcaaaaccttctcgccggcagacctcccgtagtggatattaatttctgttgttttcaatcatgccgccgcgctcttttgatggaaaccatccctgattgacctgaaatgacgcgtatttcctctcttcgggcttttctggcctcgtcgttttctaacaacagtggaagaaaagccaccataggcatggcgatttcatcgtgaaataattcaataaaaaacataa

SEQ ID NO: 819 - DNA, 514 bp, Cronobacter sp.
  genomosp1
gtaattaatggctcaagtataaatgggcttggaaagggcacattaaccgtggattatacggaattaccatcagggacatatggttatactgtatatacaacttatgaagaaagctcaagttgtggaggaaaagatggaggttgcagtgtatggaatgagtctcattattcatatgtgccttttgctgagtatacaacacaaaaattccttataaaccaaaaaaaggttgatgttgttagtactggtagtgcttctgtaatatcttccggtggaaatttaattatttcagcaggatcctttgaaaatcaggcaagtaatttactggcttcaaaagatatcagattacagggcaaccatttaaataatcatagcgtgcaagcgggtacaacatcagaatactttgtttatcaatacgagagtgatggcaataattcattacaggtaagcccaattcctgttggtgggctttccaataaaaatactaaattcacagaacacaatcgagacgttaaat

SEQ ID NO: 820 - DNA, 1633 bp, Cronobacter sp.
  genomosp1
gcgctgaaaagaaaagacgcaacggaattctttaagcagctccatgaatgcaacgatgacaattgtcgtaaaaagttaatcaaaaagtatgcggaaatctccaaagagcaggaagccagcgtggcgaactgcaagggtgcagagtgccgggaaaaaattaaggagatgcaggatattacatcagactatggaacgttccgaagagctgatgaatgcctggcatgaaggccgacacctgacagatgccgagttccaggaattaatgtacctgcgcagtaccggggcgaatctgcaaaggattactctgatggcggtgcgtaacggcggttcggcgcgagacttgttggatgcaatggctgacgccgcggggtcggaccttgttggcggtagcaaacgcggcgcgcccaaagccacatctggaaaagaaaatcaaacaagcagtaaaaacacgcaccaggaagaaagtccgcagcgcgaatcaaattcaggtgaagggaaacccggtaaaagtgacaacagtgatacgcaaaaaaccgtcagtatggttgagaagcaggcaggaaataataatatcaatcccgcaaccgataggatttccactgaacacacggtggtgtcgtcaggtaaggcacccaaaacgtcgacccctaactctgtctatgaagtatccagagctgatggtacaaaaagtatcacctattatgatgacagaggtaatatgttctctcgtgaagattatgggcaacagaggacccatggaactttggggtatgattccaacgggaaagtacctcctcatgagcataaagtggagtataattccaatggtcaacctataggtaagtattatcgagagcttgatctaaacggtaaagctattggtaagtggatctccgaaaaatagaaggtgaacatgtcaaatgatatttgcggttatttattgcctcctttgaatgccgaggagttacgtaatttaaatggttatgcggaattgcaaaaaataggtatagctcaaataaaaaaagaagagttatataattttccaaatgagctcatacctacaagcgactgttatgcatttttaataagtgacaggcctcactatccaaatgcaagctatttaatagactatttggattatgctcctgaagctgatataggttttccgttggaagggaaggcgcgattaaatatacttttagatgtgctgtctgatattttcagtattactaatgcgcaaaagatgctggttgcattaaccgagtgctcccagattgaaacgattaaaaaaattaaactttgtgagctatatgatgtgatccataaggacttcgagttgtatcaggggccgcctgacacactttatgaaatcacaggctaaagtcatttttatgacgctcgggaatatgcagcatagtgcttaatattcacagtaagcacttgttttttaaaaaaagtttgagcgcaatagttttacatttaaaatatcggcagggttaaaaatgaataattttatatcactgtaaatgcatcgtatttaataagaagttcaccatttcaactgccatggcatcatatgaaataatataaaaacccataccatgattcgattttatatggcctatgccggata

SEQ ID NO: 821 - DNA, 1256 bp, Cronobacter dublinensis
gttgaaacagatccactaaccggaggttttgttcttaacagcgccttcgcaataggtttagatgggtttgcaaatggcttattacaaccttacaaccagctttatactctccgatgccttttgactaatgaggtttcagaagatgaggctctttttcgtgccatgagtgaagctggtaaaggatactggttctttgatttgcctgcggtgaaaattacacctcataatttaatgatcaataaggtgcatgctgaagcattacggcagtcttggcttactaaagttccggatttagtaaccagccactcagcaccatgccctgagcgtgtgttagcggccgttagtaataatgattaccttaaccctaaatacaattcaaaaacgctttcttggctctctgaacgatatattgaccatcgtaaaaaagcttctttagctgaaagtgcagagaaaggtataagagactactttgcgcttatgattgaagttatgggcaatgtgactcttgataaggttgatcgtgagttcctacggctttatgaagataaattgcgtaaaataccagcaaaacgtaaccttactaaaattaaatacggcaccgaaaatttagacgaactgatagagcttgcagataaaaataaagatgaaaaaatgactgatgagtctgtcagaaagtatcttaatggcatttttggaccaatcagatgggctgttggtgacggtatttttgttcgttctccatgtgataattttcttccaaataaagtgaaggaaaaaatggatcaagaatttacagacgtctttcatccacatgaacttcatgccatgttttctttaccatggtttgctagtggcacaggagagcgtaataaacatggacgctttcaccaatatcgtcctttccattattgggctccactactgggattatttaccggggctcgagttaatgaattaggtcaattgtgtgtagctgacatcctatgcgaagggagcctttactacctcaacattgaaagcgatgaggagtctggcaaaaagcttaaaaatgttaactctcgccgtaagatacctattcattcaaagcttatagagttagggtttattgactatgtaatagctttgaaaaaggcgggccataaacgcattttccctgaactcaaagcacataagactaagggttttggaaggcctgtttcaagttggttcaatgagtctttgctggccaagcggttaggtttttcaagagatagaac

SEQ ID NO: 822 - DNA, 1157 bp, Cronobacter dublinensis
cgggtctgccgcctgcgtgatgctcagcagaaggggcgcgaaccatcgccgcgacgccgatgcggagcaacgatcccacacagtcagcaagccagaacgttatgcctatctgacagcggcggcattatccatgccgctgcacaggtatataccccgttcttgagggggccaactcagctggggtcatcgccggggagataaaacggcacgtaggtatagaccgtggtgaggcgggaaaatgcattcacataatccgttttgccgtggcaaaagtagtgaacctgtatttctgatccagtgacttcgtggtggcaaagaaagccggttgttttttgtcgccactttcggaagggatagccgcgggaggccatttgcggatcaacaggccaggtggtgataccggacagggcgtctgttgcttctttcagtaaatcagcgacaaacgtcgcgccgatcgtctgactctcttcttcagagtagcccgccagccgtgctttatcgatctgacgggacttgatttcgtacagtgatacgtaggctgtgtcggataaaaatacgggtttgttcatttacattcctttcaggttgtcgcattcagcctccttaatgcttcttcgggggtcatcttgcggttgtttgcaaaatcctgcttagacctcattaaggtcctgaacagggcgtcttgttggcgctcgtactcacgctcagccagttctgcttcgcgctctgtcgctggctggatgaaaagttcagccgtgccgtttttggttacatacacgccgccttcaaaaagttcagggttgccaaggctttcccgaacggctttttgggacatagtggttgtcatagttactaccctcacggataccttttcgcaggtgagtggctctgctgaaggtttattgtttctcgaaagtgtctcactcacttttacggtgattagccctccgtggtcctggctgcccaccgtcgttttctggtttgatttgcagatttttgccctgcaaccgcttccttacatgcttctccatgtgtcgataagccgctcaaacgaccgagccgtttatcgactattttagtttatatcagatcacggatgaggagaaacaaattcgtgataaatttgtaccccttcgctgcccgcgagcgctcttata

SEQ ID NO: 823 - DNA, 126 bp, Cronobacter dublinensis
ggttccattgcgccgcatggatagctggcgcggccctgcgcagcgcgttaagctcgcgatgcatgatgcataacggaaatgctgagggagccgaaaaatgaaacgcctgctggttgtggttgtgac

SEQ ID NO: 824 - DNA, 105 bp, Cronobacter dublinensis
ctggcgttccgcctcgatctatttatataaagaatcatttaactgtttctataatttatctgttcagaccggcgatgacgttgatttgtcaggcgtgcggcgacc

SEQ ID NO: 825 - DNA, 120 bp, Cronobacter dublinensis
tcacggcgcgtgcaaaccggagttttccgtgacgcaaacccgctgtttttccacctatactccttcgtttgacagcatatattttctggcaccatcgccctgcgacgtagcggggcgcac

SEQ ID NO: 826 - DNA, 120 bp, Cronobacter dublinensis
tcagccacggcgtcggtcatgcgcgtcgactggcgaaccggtatcttattaattatccatttatggatgaattaaaaaggcgctacgctgtgcgataaaacttatttattgatggaacgc

SEQ ID NO: 827 - DNA, 123 bp, Cronobacter dublinensis
caaaataacgatttcagactcataatggctattttcggtatttaaacggataaaaaaagataaataaaaatcggaaaaatacacgctcttaaaaaagaaacctgacataagttatttatggaa

SEQ ID NO: 828 - DNA, 157 bp, Cronobacter dublinensis
ttaataactacggcaaataatacgtgagctttgattaactcggtttatattcacgcgagcgacagcccgtgtgcattgctttttttcgacagcggaagcgcgcctcaccacggctatgggtacatcccacggcggtagcctgttcgcaacactgtta

SEQ ID NO: 829 - DNA, 216 bp, Cronobacter dublinensis
acgcgcattgaatcctctctttatgcagacggagtttgcaaaaagctggtatggcgtactgcactctcctttgttaaaaaaatatgccgagcaatacaattttagggtcgcgttttttcctcatgctaatattcagccttatttgtctgattttgcggtgccagaatatattgaggtgatcacacatgcacagggttctattcaaaacctttttaa

SEQ ID NO: 830 - DNA, 228 bp, Cronobacter dublinensis
ggtctgggcgcgtaaagcgctggaaaccgacccggcgctggcaaaccgcgtgctggctaccagcgaggcgctggaggtatttagcgaagacaaccgcgtgtatctcacccgtaaagcgagtttataagccgataaaagggttttcccggctgtaaaagacggtgttgatttgggtacagcgcatcagatagcagcgaaacgctgaaaacaggcggtggtccgggcgaa

SEQ ID NO: 831 - DNA, 121 bp, Cronobacter dublinensis
ggaggttaccgggcgcccagaaaagcgtgaatgaggtggcgggctttgttcacaagcggcgtaagccttttgcgccgggcggtaagcgcgcggcggcgtatcggcgaggcgctcaggagcg

SEQ ID NO: 832 - DNA, 210 bp, Cronobacter dublinensis
gccctcttcgagacgaataaccggtaaccctgcctcgcgagcgcgggcaacggctgccgccgcgctgggccggttgccccagacggcaatggcaccgacctgcgccgggatcgcacggcgcagcgcgagtttgcgacagggcaccggcagcagccgggctaaacccgggatgcgccagatacccggtgagaaaatcccgatgaccgtggt

SEQ ID NO: 833 - DNA, 137 bp, Cronobacter dublinensis
tttttctcgaaataaaataactcgtgccagacttatggtaattaaaatacttatggcgtccggcatttatttctgacattgcccgccggaatagcgttgtcgacaaacgtaaagcggccagcatagccgtaagccgc

SEQ ID NO: 834 - DNA, 127 bp, Cronobacter dublinensis
gacggcttttacggcacaataagcccgcttccgcgcgttattttcataacgtgtgtttatctattttatggccacgacgggcatgaaattgtatataaaatgtaaattcgtgacgcgtattaattag

SEQ ID NO: 835 - DNA, 166 bp, Cronobacter dublinensis
acgtgacatcagcctgaaatggttttcgccatttcaggcttttttattagattgtacttactatgcagaaaatagcgatttgtggtcattattggtctcgttattgtttccgccttgctaccctgcgccctgcatcgttaaaatttgataaaaatcgacgttatga

SEQ ID NO: 836 - DNA, 117 bp, Cronobacter dublinensis
tgataaagacggcgaacagcgccaccatccaccccgcgcgcttaggttttttgtggttttcgacgggcagcagatcgacaggaatgtcatcgtttactttgatgccaagtttgggga

SEQ ID NO: 837 - DNA, 180 bp, Cronobacter dublinensis
gcgtcttttaagtattaattaaagagggtttaatctttaatgcatgatatatttatccatatgtgtttgatatttaaaaataagtccagaaaaatttttgttaagtttactcttttgtaatatgtgtcataaacactgttattttttattgacgttttattcgttgtgattggcaggtta

SEQ ID NO: 838 - DNA, 560 bp, Cronobacter dublinensis
cgcgacccgtactccaccgcccgcgtccggcattcgccgtattcatgcaccgggcggtgaattcccgtcagtcgtggtcctgaaccgcgacgccgtttcccgttgtgacaaccgaaaatccccgcgtgatatacctgtgcgacgtcgtgtcgacggccgcgctataggtcttgcccggcgcaaaatgaaaatcgtcaaacaccggcgcgcagcgacgcgagtccagcatcaacgtctttgtcaccagattcttttcataaacatcggcttgcgcctcgtaactccagacgctcgcgcgcaggattttttccggcgtgggtacgtgttcttcatcgacggatacgcagacctttccgtcagcgaccgcggtttgcgcaggcagaaaactgacgcgatcgccgagaaaacaccctgaaagcaggcaggccagcgcgggaataagcgattttttcatagcggcaatccttgcggcgcagatgatggagtgaacattatgcctgcccgcgcggaggctggcacccgtgaatgcgccgcgccgcgtgtcggcgggcggtatcctc

SEQ ID NO: 839 - DNA, 120 bp, Cronobacter dublinensis
caacggtgggctgaaaaagcggatgcgcatgacgtgtccgctttttttatgggtttatccgcagaggtcgggttcgcttcgcttacccgccctgagggcccccatccgctggaagggaag

SEQ ID NO: 840 - DNA, 116 bp, Cronobacter dublinensis
ggcgggggcggtttgtttgatggcgggtgcgctgtgcttacccgccctacggatacaggtttaaggaaatggtagggcgggtaagcgcagcgcccgccacagaagacaggtttaag

SEQ ID NO: 841 - DNA, 115 bp, Cronobacter dublinensis
catttctgggcgctttttagcggtttcgatgcattaaaatatttaccatatcaattaattgaagcggcgaatggggagggcgagcgtttttcccgatgccgttttaaaactgcgc

SEQ ID NO: 842 - DNA, 115 bp, Cronobacter dublinensis
agcctcttgcgttttacgggcggccatcaccgcccgttttactttatctcttcgcttttccagcattttattctgttgttatttaccgcctcgctgccggtctgcctctcccctt

SEQ ID NO: 843 - DNA, 306 bp, Cronobacter dublinensis
cagcgctctccatagcggcaagccttcggcgatgccttgtttaacacgaccgaccgcctgtctccataggggcgacgccagcgtttcctcaacgcttgcgaggctctgaagtaatggaatccccgtgcgctgcatcaatgaaagcaccgtataaatctggcttagctgctgcccacggataagcgggccgaacagtggcactttcagcagtaaggtggcctcgcgcagctgccatttcggcctgcgccgcagcctgataatcacccccggagccagcagcaacaggctgagccaccaggcggcgta

SEQ ID NO: 844 - DNA, 212 bp, Cronobacter dublinensis
cgcaggaggaaccatgcaaagaaacagattcaggaatctgtcttcagaagaattttatgagtttgcagaacacaacaatgccgctgcgtaacgtctcgcaaaagcgttaaaaaacaagctcatcttgcaaaaagagcgcgacaaacccgaggagaatattgatgataggccgcaaggcgagggcaggcgcaaacctgcccggtggggtgtcg

SEQ ID NO: 845 - DNA, 137 bp, Cronobacter dublinensis
cgcaccctattttgtgtatctgctgcgtaagcagagccggtagggaaggcggggggttctctcgggcagttaaacccacccacgcctgccccacccaccctacacactggcgtgccgtaaatgccgtaaatgtaggg

SEQ ID NO: 846 - DNA, 112 bp, Cronobacter dublinensis
accgcaaccgcaaccgcaacctgcgccgacgcctgagccttccgccagcaacgtcgcgtggatgccggcagcaaagtatcgctgagcgcggcgggctctaccgatgccaacg

SEQ ID NO: 847 - DNA, 123 bp, Cronobacter dublinensis
aagccgcccgctactgctgccacaggcgctaggcgcgctggcctttggtggcgagggcgacgccgtgcgcgccccgcgtgcgcaggaaaccctctcggtgcgctttagcgcgtcgggcacgct

SEQ ID NO: 848 - DNA, 121 bp, Cronobacter dublinensis
ggtgatcccttcatcaacgaagcgcgaaaacctgcaaagtaatctcggtgcattagcgttgaagctcgacagtgacgatatggcggcgatcagtcgatgaagctcctgatgcgtgtactga

SEQ ID NO: 849 - DNA, 141 bp, Cronobacter dublinensis
cctgcgctgtacgtcattaataacgccgcaggaagtgaaacctgtcgcacgcatggcttcgccctcggcgcttttgcgacagacacggctgcgcatatgtcttaagcccgctcgattttcgggagtgctttacgcaggcac

SEQ ID NO: 850 - DNA, 998 bp, Cronobacter dublinensis
gtctctgaacacgactaataacttagtagacacgccggttgctaacgttggtgatattgagttttggtttgagattgtggcgtcaggtcagatcgttgccagccagatataataaagcccctaaaggggcttagaattccactctcacattttcaggtaggtatttcttatattttatcaaagagttttcaatatcttcttttgttatctcaaacaaaatatccagttcggtttcactggttctttttgcgccaaaacgctcatggaattttattactgacgaattgcctttacgtacatcaaaatgcgactttgaaaaacctagttttaaaccgtagtaatacacaagtaacgcagattcgatagccgtattagacggggcagagtcggcgataacccacgaaccccagcagaaagaatcaccttgttgatcgtataaacgtactgtaccaagtgagttaccttccatgtcagcgatgacaaaatacgcctggtcggtgctttttaaatatgactccagccattggcgctgcttttctacatcagaagatgtcgagcttataaagcgtccttttttggcgtcagtacgaattttgactataaattctgcatcatcgggatgagcattgcgcagaatgatgtttttccctgtgatggatttgcactgaatgatatctgggcttgttgggaaaccgttcattgttagggcctcttgtacgtgatctgatttatcgttgaaaaggatttcgatggatgaaacaggcttacccgggttatgcactactgacgcccggaccatttcgttctcatctaaggatagaaacttaagctcatcagcagatgtctctggggagtttgccgccctgaatcttgaatgcagatcacgcataccttgttacctctgaatttcgtaggtgaaaggtagcatgaccgagccgcagactgaagagtcggcccatgccaggagcgaagttaaccgttcatcgtgcatcggagcg

SEQ ID NO: 851 - DNA, 106 bp, Cronobacter dublinensis
ccttgatacctctgataaatgcttttgcgttttacaggcccaaggcataacagcatctgcaattataccaacctttaagttgaaagcgtggctgaactctctggca

SEQ ID NO: 852 - DNA, 252 bp, Cronobacter dublinensis
tttcctgtcctttggaaaaacaatgttatccgggtgactcaccggccaacattacgccaaaaatcggtttaattttgtaagacatggagaagagccgttaaccctgattcggcgggaggataacagcttgttatttataaattgaacgaatcatattttggccgggaatggcttcctgacagtttatcgctccacaccttcccccgccacacttcccacccaggcctgcgacatcacatcgcgccagacttc

SEQ ID NO: 853 - DNA, 100 bp, Cronobacter dublinensis
cgtaaggatggtgataaccagcggctcgctgccggaaagcgcgatgcgccagcgcccgtccgccagccccacctgcagcgtgccgccgtcgaggactcat

SEQ ID NO: 854 - DNA, 175 bp, Cronobacter dublinensis
ccctttctgataataatgcggcctcgcggtactaccgcgcccgttctcccgtctctactgttcccgcttcgcgtatttccctgagattgtccttatttcatcacgggttatccctgctaatggccgcagaactcacgcacgcgacgctcagaatacgccggacggtaaaacactc

SEQ ID NO: 855 - DNA, 188 bp, Cronobacter dublinensis
gtggctatgggtttctttcagtccagacgtcactcattaacccaattgattcattacgacaggtgcaaagtgtgatatcgcttatttggctttggggcgctttttgccaggggtgagcgttcgcatatgttacttagtattattagatgggggcacgttcacaaacgctattacaataatataatatc

SEQ ID NO: 856 - DNA, 114 bp, Cronobacter dublinensis
gctgttttgacgtaaaaatgttttgcgtaattctttttctctaaataagaacgcttgaataattcaatctgctgagcatagcttatctctccaaataactgccaggtggtttcg

SEQ ID NO: 857 - DNA, 415 bp, Cronobacter dublinensis
aacggtggagtcgatccgcataatatgtggcatgaatttttttcgacttcccatgacacttcctgtcccttaacgcgtcaaaagatttttttactattatgcaatcttaaggatcacatcgtcacttgaaaaagctgtaacaaaaagtcataaaaaacctaccagattcaaaataaatgactaagacgtatactttttttgcgggctgtctgcttgtgcggagtattaaaaaaccaggcatagcttttggggctgactcgacatcatgaaccgcgagttcacctattgatgcgcgactaaaagagaacatgctgatatagcgagctctttttccgccaggaaggtacctggcagtttcactattgaattcaatttccgcacctccctcatacccaaccgctacaccccctgtttc

SEQ ID NO: 858 - DNA, 147 bp, Cronobacter dublinensis
gtccggcgcggtggcgatgccgaaatttttcaggtcggtatgggtttcgccgagcgtgttcagcgactgcggatcgagcctgtaaattacgccgccctgcacgtccttaaacgactgcgcggtggcgacgtagagcgcgttgcccgc

SEQ ID NO: 859 - DNA, 333 bp, Cronobacter dublinensis
acccctcagtaacccgcgcgcagccccgttttattttgagcgccgaaccgcgtaataatcttcgcctgggcgttcatatgcccggtatgtgtatatctggacagggttcagcccgtgtcggtgtcgggtgaatgctatgattttgaccacaaaatcatagcaatgcgtcatgacggaggcagtacatggaaatggagagcgcccgccatttaacccctggcgaaatcagcgcagcgaaactgctttataaaaactcgctggattatcaaaagacttatattcacaacgcgccctggtttccgttcggatttcagaccgcgcataccgcattat

SEQ ID NO: 860 - DNA, 363 bp, Cronobacter dublinensis
aaatgatgagtcaggtgatagtaatcctgggtaagtctttgttatttcgtggataagaaaagcatcttttttaattcgttagggcgtggttttccgcgcgaatatattgcttatcgtctttggttttcccataacgctttcttttgatgataagcatcgtttatgttttggggtgaggtatcgacaggcttcttttaccgaacgcgattaagcacctgcgtttttgggcgcccggaatgaccgcgcgcgatgtgcttgcgactgagagagatatggtcgggcggcggcgcgaggggttgtgtcgctgacccggtcgttgcatacacgcctgtcgcctgcaaccgagagcggcgcaacctattt

SEQ ID NO: 861 - DNA, 159 bp, Cronobacter dublinensis
tattactcactgcggcgttttgctgcggctgtcgccagaaattaccacgtaatacggcgaaatgtttcagaattcatgaaaaggccactttttcttcacattctgacattactttaatccaaaccgggagccattacggcgcctctgcttttttaactc

SEQ ID NO: 862 - DNA, 128 bp, Cronobacter dublinensis
ataaggacgcgaaaggcgaggtcaggtgtggtttaaaggtagcccgccggggcagggctggccaggcggagtattgacgccagtaatgtactggcgggcaggacgcccgtaactggctgatggcgcgc

SEQ ID NO: 863 - DNA, 159 bp, Cronobacter dublinensis
taattacttttatcactcgcagttattttattttccaatctaataaggtaaagaggttttatttgaataagtaatcgtttttccgtggcgcgcaggcgtgattttttccagagcgaggcgataaaaggcggcggcatcaattatgcgtactggcgttaa

SEQ ID NO: 864 - DNA, 479 bp, Cronobacter dublinensis
cagaataacagtatgctaatacgcgcttttatttgcaggcttcttcgtgaggaggattattctcacgctctgaatcaaagaatagccggcagtgttacggttattttaaacagcggctggcccgtgcggcgcttaatacttaagaggtagccgcggctccacgataatagcttttacgtattgcgccggtgctaattgcaaaggtgcttcccccacgctttaaaatatattctcgccgttgtcataagtttattgtctgactgataagcgtgccgataaagataaccggctgcgctttttctgtactctctttatatcgctggtacgcaccacagcgcgtgagctcaggtcaccgctgacgggcgtctttgcgtcaggttaaaaaggcatcagcacgtctgatgaagacagtaaactccttgattgtccatgagagaaaagccggattgctgctttcattagtgaaaattaccgagcgg

SEQ ID NO: 865 - DNA, 116 bp, Cronobacter dublinensis
ttcgcggtgccactttttatggaaacgacggcaaaaggcggaaattaacggcgtaagaacgcaagagggcgcagcggcgcgaatgtaacaaacggtgcgccgctggctaagggagc

SEQ ID NO: 866 - DNA, 114 bp, Cronobacter dublinensis
cgaacaggctgaacatcttaaacaccagctgacacagcagccgctggcgacggccacgctccacgcgggcgggcaggaaatgacgtggcggcttgataacgacctgcttactga

SEQ ID NO: 867 - DNA, 234 bp, Cronobacter dublinensis
aagggctttcacaaactcgtcgcggcaatccgggtagccggatttttccccgcgccagcggggataaaccgacccccggctatcactgggtggttgttgtggagtgttccccgcgccaacggggataaaccgaacccgtttgccgcggcgcaaaaaactcatctctgtcactcgtgccagcccgaatatccagctcaaccacccgacaaggcaaacattcgcaacccctcccaa

SEQ ID NO: 868 - DNA, 264 bp, Cronobacter dublinensis
cgccgtctgcgtctcagctttaagcgcgagcaacgttttttccgacgcctgtaactggctttctttgtccgtaagcgactgtttcagcgtcgtgatttccgcctgcgcggtggtgagctgctggttcagcgcctctttggccgctgctatctgcgtggcctgttgctgctggctctgtagcgctctgtctttatcgctctcgctgcccttgacgctggcaagcgccgcctcaagcgccgtcgctttctcctgcgtgcgggtaac

SEQ ID NO: 869 - DNA, 211 bp, Cronobacter dublinensis
ataaattaaaagcgattattcatttgtctgatttatatatattcgcggcgtggcgtatttccgcccggtaaaaccgtgcgagaaaagacaggcaattaaccgcatcaataaaaagcgggcataaaatcgcggataacaaaaaagcggcgtggtatcgccgctttgcagtggttgagcgttatgcgcgcttagcgcagtaaggcgttgatcc

SEQ ID NO: 870 - DNA, 211 bp, Cronobacter dublinensis
gaaagagtctggaagatggaaaatccggtctgttgcacggcaaccgccggagccagcactgcgccagccataagctcccggcacctgcacggccctcaccgcgcgtaatagcgctttccggtatcgtgctaaccccgcttcattaaggctacagatgcatagcagatgacgttttgcgcatttttttagccaaatcgcgctgttttacgct

SEQ ID NO: 871 - DNA, 109 bp, Cronobacter dublinensis
atgctgccgcttctctccttcagagtatccctcactgccttttcacggctatgacgcaaaatatctatttctgcgacaccgctttatttattttatttcgtcttttaaa

SEQ ID NO: 872 - DNA, 153 bp, Cronobacter dublinensis
ccgcttattcagctctgcctgccgtggttccaggtgcggccgaccccgagggccgggcgtcccggcggctgagaaaggttaagatcgcctttttgcggcgctggggtatgctgaacgtttccgcctgcgaggaactggcgatgtcaaacatgg

SEQ ID NO: 873 - DNA, 126 bp, Cronobacter dublinensis
gacgacatgcgaggcgtgtccgaccatgatcatcggcgtcggcagcccgatatcgttttgtgtgctgaaccagatcgggtagttagattcgttgatccacgtcggcggcggcagaggttgtgaagt

SEQ ID NO: 874 - DNA, 106 bp, Cronobacter dublinensis
agcgctgatgcggggctttttttatcgcttacccgcgccctttaccccgaccgcttgcaatttcatcccggccgctttacgatattgatacgttataacatatcca

SEQ ID NO: 875 - DNA, 146 bp, Cronobacter dublinensis
tatgaaccagctgctggtatcgtaagcgtagcgtgggtcggcgcggcaaagcgcacccgccatctttaatcgccactcctgaccctcatctctaaccgcccctaatccccatccagccatttaaccgtttttctcttactttttcc

SEQ ID NO: 876 - DNA, 273 bp, Cronobacter dublinensis
cgcagaactgcgcattatcctgagaaaaccaagatgcgatgcggggagccggtcgggccagttctcgctttattttcaggaaagcaggcctttcaggcccgaaaagtgttaacccggctgcaatggcgggtttttcgcgccaaatgatgattttttgacgggaacatgaccgcaagatgatagcaatcatcaggatttggcccatggctgcgattttttgcagataacggcctaaaagcccgctttgtgaataaggcgtaaacatggcggctg

SEQ ID NO: 877 - DNA, 105 bp, Cronobacter dublinensis
gggggggcccccccgcgcgccagcggatggctggagccctgctcaagggcggcggcaagggccagcgcctcggcctctgacaacccgtcggtggtcgctatcgcc

SEQ ID NO: 878 - DNA, 150 bp, Cronobacter dublinensis
aaggctgctccgcggcaaggcgctgtttcgccagttcagcgcttagcgaattttcgcatagccttatgcgcctcgggttttaccgcttggggcgcttttttttacttttatttttcattgcgttagcgcgacacgccgcgcactcctgca

SEQ ID NO: 879 - DNA, 418 bp, Cronobacter dublinensis
gcggcttgctgccggtgaagcggtatgagggcgtcgacaaaatagcaagtgggcgcatgcgaacaccgcccccgcggtgcgaaaggcttaacggcggggctgcacggtgctcgcccgttatgctccccagtgcgtactgatgacctcgcggatcgcaggcggtgtttcggtgtcggtcagggaggcacagaaagcggcccgtgagtcccacgagctggcctttaacagcgtatattccaccccacatgccttaagcgccatctcaatggcggcagagcctgaacgttttgtaccgtaaagtttgtacatcatgaactttcccgtaagcgatattctctgagcgtagcagagcattccggcttgcaattaatcaggcgccaggtcactactatccagaccagacatccagaataggtat

SEQ ID NO: 880 - DNA, 109 bp, Cronobacter dublinensis
gcggatgaattcagcgacgcgccgctgcgcgagaccgatacggtcatttttcactgccagagcgggatgcgcaccgaaaaagccaaagacccgcttatcgccgcggtcc

SEQ ID NO: 881 - DNA, 518 bp, Cronobacter dublinensis
ttctcggcctgattaatcataaatgatcaagtggttatgtagtatgcaacccggctttctgagatttataaaaattaatcaggcgcggattttctcggagacagccagtggcctcattattcatttggaggcggaacagttatctctgccagtaaatattcatgatttttataattaaagttccattaatacatttttcttcttttttctggttgctgaaggcctcttttttgtactgcaaaagtatgtcacgccaataaatacttctcaatctattatacagaggagagaattctgcaaaaatgtcccttttaagtaaattaagtaaaaacatgaagttatgttcattcattgcatggttttgggaacatggcacgggctaaattcttaaatgattccagtaatagaattttggtgtttatcttttgatgttttttttctattttctaaaaaaataacggaaataatctggaaggaagacaacaattctttccagagtctatctttagggaaggcgt

SEQ ID NO: 882 - DNA, 540 bp, Cronobacter dublinensis
aataattctcaccagcaatgttggtagcgataaaataatttcagtatgtcgcgatgaggacactgcgcctgacgaagaaggcttgctaacaatacttcagccggagttattaaaggcgtttccacccgcatttctcggcaggctaacggtaattccgtatcttcctttgcaagacagtgcgctggcttttattgttgaaatgcagcttaaacgtgtggctaaacgactgagcgaacatcataaattaatgctcagctatgatagcaatgtaattgattatgtcgtcaggcaatgtcacgtagctgaaactggcgcgcgtgtattaattcgatttattgagcaaaacattatcccgcaaataggaaaagtgcttatgaataccgctcgtaaagcaagtcttgcgggcgtaattattacagcagatacagaatgtcttttgattgaacctgttattgagaatgacgctgcgttaaaagttaatgacatgcagtaaccggggaccatacaaggatggttcgtttttaaaagctttaattggaa

SEQ ID NO: 883 - DNA, 248 bp, Cronobacter dublinensis
tcccagagtgtctgaagctgtgttagtcatttttaattaatggcgggacgttataatcaatgtagccataacggcgacgagtcccaatggtgtagctttaatgtaaataataaaaaagccgcttatgagtagcggcttaaacctgttgccaggtggcgcgcatactaaagggataccgctggcgacgcaagcaatggtcggcactcgccagcaatcccccctatatttcgtagtggtaataacgcgac

SEQ ID NO: 884 - DNA, 117 bp, Cronobacter dublinensis
gaaattattttttcaggaacaggttaaaaccggcaatacatccccgggggggggttttcaggggcaggtggccgccgttttttgattaataccgctaaccagaagggccctgcgttt

SEQ ID NO: 885 - DNA, 116 bp, Cronobacter dublinensis
ctgcgaggaattactcgcaccttatggcgcggcgcttcagccgggctatttcgcccgtgccatcgacaagcgaggttaacgtgatggatctctccctgacaccggccacgcacgcc

SEQ ID NO: 886 - DNA, 155 bp, Cronobacter dublinensis
gagactggggtaggggagccaggaagcgcgcgctgcgggatgtgaaggcggcgggtgcgcttcgcttacccgccctacagatggtcatgcgtgatgggggtgtaatccaccgcgggtgcgcctcgcttacccgccctacagaagggcatgcatgg

SEQ ID NO: 887 - DNA, 152 bp, Cronobacter dublinensis
atccggggcgggtcgtaatctgaaaaacgaagccgccttcacagaagcggggcggcggcggggcgcatagttttcctgcgcgtaacggtaagaaaagcctgtcggtacaaggcgttcagtcgcccgtcgtcaacacgcatggcgcgttgtct

SEQ ID NO: 888 - DNA, 258 bp, Cronobacter dublinensis
cgaaggtgcaaggagggaaaataaaggctcattaaattaatgggttgcgcgaggtcgtgcgttaacggtgatgcctgaaaatgtgcaaggcgcgtgcaatgtggaatttgcgttagggaatggcatgcatcgcgattattggcaggcattattatggcgcgttcaggaataaagaaacggagggtttttggcgggcgctggcggcctgcaattaggtttttgtggtgggaagcgtctgaaaaaaccgtgcgtggcgcg

SEQ ID NO: 889 - DNA, 126 bp, Cronobacter dublinensis
ctggaaaacttcatttttgaaacaataaagttaagtaattattcaaggtcacgtcacgttactgacgggtaaagacgcgggaaacggggtgaaccgggggcttttcagtcgattggcgcgcgtggc

SEQ ID NO: 890 - DNA, 124 bp, Cronobacter dublinensis
tcgcgctttacagccatcggcatccggcgatggctgagattttatttccgcaaggttgcgccgtcaggccaccacctgtcccgctatttatttcttcctcccgcttatttccttttatttaaac

SEQ ID NO: 891 - DNA, 113 bp, Cronobacter dublinensis
catcgtggtcattcagtttctgattagcgcaggcgtattgcgcgaagtgggttagggtagggttattcgtgactcagcgccttactgaaataaaagcgcgaatggcccgcccg

SEQ ID NO: 892 - DNA, 788 bp, Cronobacter dublinensis
gtgctaaacgtcgatcggccgcccttaacgcgccctcgcgagccacaccgtcctgtcgccgcttgccgcgtcgttcgggcgaaatgcgcccgcaggcatggcgttcactggcgggatggcgcttaaagcaggccggtagtgatgctattcagtgacaaacccgggcatcgagatcgttaaattgtttcacctgcgagcgaaattcgtcgaccagaaagtcattgctagcgctgaagacgatgggcctgcgcgagaacttgtagcccaccaccagatgcgcgggctcagcggaaataaaccgggcccccattttgttgccgagtggggtctcaccggagataacgccgcagatatagcgctgcccctgggattcgtgcgatgacatggcagagaacgtaacgggttttgtgaaatcgatatcgctgtcgcaaaaacccaccatcaacattcgggtttgctcatcctgtggatttttggcattcgcgtctttaagcagggcgcaatctttcgggttgcctgcgctacgcttaaaaaaatcgataacggcgggttttacttcatcaaagcgaggtgtggcgtgcgccaccgtgttttgcgcagcaataatgaaaagcagtatcggcaggagtgtgtgtttcatgagggccagtccttcagcgcctttatagggcagataacactatggggcaggttgggacgtaaaatcagaggttatctgctttcgccccacccatgccccatataccagcatctgattaagatatcttatttatttcaacaagataaat

SEQ ID NO: 893 - DNA, 103 bp, Cronobacter dublinensis
gccggtgagcagccagaccgcagccgatgttgtcgcgccggtgtcgagcgacacccaggtgccgcacaacctgaacctgcacgcgctctcttcgaccacgcaa

SEQ ID NO: 894 - DNA, 109 bp, Cronobacter dublinensis
cggcgacaaactcgtccgatacgcctttgatgaccagcgcgtggtcgcgcacggtgggcagcgcccaggcaggagcatgccggtgcgcctggaatgccgctatcgtggc

SEQ ID NO: 895 - DNA, 123 bp, Cronobacter dublinensis
attcatcgaatcaagccgttaacctctctgaaatattcgcgttgcgaattaatatgatttttatctctccctttattttctctcatggatcagcgcatccacacattcccctgttttaaaaaa

SEQ ID NO: 896 - DNA, 135 bp, Cronobacter dublinensis
cacgacggcaaacgctacagccggactgagcacctgcagccgtaacggcataataaaaaagccagcctccgggctggcttttaagtttatcagtgcggcgtattacggcgcgtcaggcagggaatgcacggccag

SEQ ID NO: 897 - DNA, 432 bp, Cronobacter dublinensis
cgtctgggcgcgtttgcgggcggcaatgttcattatgatgctacacccctcctgaaacgcctgccgggcgcgcttacgcgtcaggctttacccgacaaggtgacgccgacgagcgcattacagaggcgctgagggtaaaagagggcatcacgcttaagagacttgcgcaggtgacttcattttcgctatgccgcctgatgcgaatttcacgcccccgacagggcagggcgcttttctgtcgtgctgcaataagcgataagttttaaaagtgaaattaataagtaaattaattgtgaaataaaaagatattttttgatctaaggaattcagattcgctgccgatattaacaaggaagtgtgattaatatctcgaatcgatcgtcagagaaataacccagagttattattcgttgcgctttggtaacccgatag

SEQ ID NO: 898 - DNA, 128 bp, Cronobacter dublinensis
cacaaccccaccatgactcacaaccccaccatgactcacaaccccaccagtcacccacacacccatcacttctctttcgcaagcttcagcgatgactcgccgctctccgctggcgcctcgccggatcc

SEQ ID NO: 899 - DNA, 196 bp, Cronobacter dublinensis
atcataaaagtctttatgaacaatgggatggctaattttgtaagtatttttatagcgcgtaaattaacaattttgtcagaaagaacggcccacgcggttattttaaaagagaatgcgtcgcaacgcggaaatatctgaaactggcggggaataaatattctggcacggtatccaccgtgccgggaaatagtaataa

SEQ ID NO: 900 - DNA, 167 bp, Cronobacter dublinensis
gttgaggtgggattcaggcagacaacgatacttctgatcgaccggggctaaaaaaacggtatttcactcgaatacacatgtgtgcatggaggcaaggcgcggatgaaaacgatttctgatgaagacattaaggcaacgattttaaaagaactgccgcgggtaacgtc

SEQ ID NO: 901 - DNA, 286 bp, Cronobacter dublinensis
tacaggatcaggcccattcctgtttttgttttgtagggcgggtaagcggccacaacacaacggtgggtgcgcattcgcttacccaccctacgtaaggttgagtgaattgtcaggcaggtaagcagagcgcatccgccacaggccgcgccacccacaccgttccccttgccagagctgtagggcgggtaagcagagcgcatccgccagaacgcaacgatggatgcgtattcgcttacccaccttctgtaaggttgagtgagttgtagggcgggtaagcggagcgcac

SEQ ID NO: 902 - DNA, 104 bp, Cronobacter dublinensis
gcataagcgaatgggtggaagacattccaactcactcaacatcccgcccacccaccctacgtaaggttgagtgtgagagggtaaacacgtgcacccgccacagg

SEQ ID NO: 903 - DNA, 119 bp, Cronobacter dublinensis
ttcacagcattacgcgctcgcacgtgacaaagaaattgtcgtcgttgatggcgcgcggcgcgcgcctcgcgcctgaaaacagtcgatgccgttattaccaacggcgcagagccccggtc

SEQ ID NO: 904 - DNA, 551 bp, Cronobacter dublinensis
gacaataaggttgtaacacgttgaatattatatttgtatccgttttatgccacgctggcgtatcggcaggcaagccggtcaggccaatgttgatggattaatttccatcaataattcatcagaagaaacggtgcgcacggcatcgttgtagtaaccactctattccggcgggctctgctttacactcgaccattcaggtattagacctgtagttgctctaagcgtctggcttcccaaagggcttaaatgtatctttgcgcacatgtatccatctcccctccttctgcctgagcgttcgcaacgcctcttaccagcaagaatatatgtttgttacagcaacaaactaccgccagcaccctggcgcagagcagaggtgcctgtttatctaagtagcgtttgaactcattaacacaggctgagtgtgagtcggtaggcttatcgatgtagagtatcttcaaaattaagggcctgctaactcactttcccaccaagaaataacgggtgggactggctattattttttccgcttgactaaaagaaaagcgagaccc

SEQ ID NO: 905 - DNA, 4784 bp, Cronobacter dublinensis
ccaagaaataacgggtgggactggctattattttttaatattcgttaaccaaatatcggtgggcaagataatgattaatttgaaagcagttacgccggttgcgggattggaaatggatccgctatctgctacaacgttaatttttaaagagatgtagccgcttttcgactgcttggtggactcagacatcgtcaatgaggcggtcattatgggagtcaaataagtgtactaatcatgctggcatctaaaagagatggataacggcttcgccattccgtatgaggctgtaggccgtgtttgagcagcgcctgaagcgcctgtttttggaaaaagtccatttcatctgttctctggacgtgacgagtagaatgcctggcaggcacgcctgggtctgcgcactgaagacaaagagcatagacgaatagcaaaagatgcaggtgttgatgtttgatgaccagtgaatgcaaaagcggattaaaaaagttggggatatgcagatgtctgtgaagtacaggccggggagttcggcgtcaggcgctcagttcaaaaagcgtgttgcgaagttgtttgggcgcgaggtgatttcctgagctgatattatacccggataaatgataagagtttgcgacattgaatacgctattcaattaagcattaaaaaatcttctgcaattaaattgattgctgtggaatagttcgaaatatataggagataccatgtcaggaaccgtaattttaccgacatttagcgggcacttctttcatgccagtaacctgattaatacaataagaaaaacgtcaggtgacattaaaattgatgttatcatttccaaagctgatgaagagctttttagtaagtacaaaaacgatgatttttgtgaaataaagtacattgaggatcttataaaagaatactcgggtgttgatatttcagcaaccgatttgctcaaaagtattggaaagtttcgttttcaggcattaaagaaactgcttggtgttctctattgtaaaacaagtctggcactggtcttagatagcgaaaccaatatagtcaaaaatcttaatgaaatgttttcagaagggatagaaaatacatcagttttatactctcatcgtcaatgggataaagttccacactcgctgactacagaggtccgtaccgaagttaatattttattagaagagcatagtgatttctggttttttgagtctttcaactgggtttatgatatccagatccttaaacgaatgttttcagtcatcgagtctaaatttggtaaagactggatctttagacaaaaaccattatttgagtgtcagctttactaccaatttgcctatagccaaaatagctcatataaatttaccagagtggaacagcttttccttgaacactttggaaatgagtatggtaataaaataattgacaggttctggggatcgtcatttacattctgcggcatgattgaatatgcagcctatctcatgagcaaggaggagtatattagtttcgtgactgatcctcaggtaacacaccatctacgtttggttcgccatgagccgccattgatatatgatgtagtagacattgcaaggaaacagagttcgcctaaagagtactatggtgaggctgcaatgcatcgcggtgattttactcgcggtaaaattgctgtattgatctctggcgactttcatcatttagagaatattcttaacatcaaaaattttctggcgggtgtggagtgtgatttatttgtttcagtgttggaagatagctatcttgttccgttaataaatgaattattatctcctgttgctattgtggctgttgatgataatttgcagctaggaaatcatacaaaagtattagctttgtctgagggactacctgagagagcgacgaaacctaatcgagatattggggttgcaaatatgtttgataagcttgctgtggcctatcaggcaatgaaaaaacatcaattaaatacagctgaagactatagtattgttgttagagtaagacctgatattttctcaacagccagacttaaagatgtgttttttgacgttgctgaacattcacaaatcgatgatgaaactatcttcttcccaaatcgattctggagccagggcatcaatgatcagttctttttcggtaagtcaaatccaatggaatcgctattggatatgctcactggcaataattatattaattgtgagtatcaaaaccctgagtattttttgggaaacactcttttggcacaaaaattgaagcctgttgcttttaacttcaattatattttaatgcgtggacagagagctgaaattcactcaataaattcaaaattgttcgagcaagaaggcgctttttggtctaaaacgatcccatatccatgttggaaggatttgtctgcgcatttgaaaaatatccttaataatgtttacatcaagaatgctcagcttgaggtttccagcatttttactttcaatcgacaacacatggactttttctacggcaaaactagcgaagggaaaatatacgcatttacatcgcagcaaaagtcaccgcacgtgaaagtaagtctggtgcggaaaatgtacataccatttttgtcatatttaatggtatttggatatccatatactattactgacaccagtaacgtaaccctcttatcgtatgctgaagagaagaaagaaataaaaattaagacagaggatggtgttgaatcactgaaaatatacacgccaaagccatcgacatttgcgtggttaatagttcagattgccaagaagacaaggcgtgttttaattagaataattcgacgttaaatttttattgaccatagcatatataagcactaaaccatatggccgttagcgtcatatggtttagtgaaaattaatttgttgtgtggagagtttctgatgatccaagagcgtgtctcatttatagaagtagggcggattgcaagcattttttttgttgtccttctgcatgcatgtttaggtagttattatctgtttgttgctcagcacgacattaattggtatatgacgcttgcgtattatacatttagtcgcgtctcagttcctgtttttgttatgattagtggagttactacaatctggctaaaatatgaagctaaaaaaactgttagtattcatgatgcattaaatagaataaagaagataattatccctattgtgttgtggtcgctgttctatcttttgttgttaaatcagttcacagccgactcggcattgaaaattttatggtctccacaaggccttgtacatctgtggtttctctatatgttgataggtctttacttgctttccccggttgtgtctctggtattcaacactgctaataaaaacctcgttcgctaccttttggttatttggtttatcttttcatctgttaatgtttatttttcgccgctgtataacggaaatttgggagattggtttggtttatttgcaaattatcaatccgggtttcttggttattatgtgttaggggcgtatatgatgttacggcccgcattgtcattacgatattcattgttaatgatattagcggggtttgcagttagctatattttggttgtatgggataactatggttccgcatcctttaatgatcgctatttgaatttcttgtcgccaaatgttgctattatgtcatatgggttcattagtctgttaagaagaatggattttagcaaggtcgttttgtcttatatatattatgcaagcccattagttattggtgtttatttgacgcatgaaatgattttgaaatttttaagagagcattttgggttggttggttatggatataatgcaatctggtttatccccgtgcttgctactgtcacagtactgatgtcaattttgttgagcttcatcttaagtaagctccagggcagatataaaatattcttctagttgtgttgagaggaagttatgaatactcgtagtttatgacttccacacttttcaatacaacaagtgggatggatacataaatgacgccagcgcttttgattttattctgcgtagtgcggatgaattattttttattttgtgaacctactgtgtggtatttctgggtcagccttataccgagctcacattataagatttttatccgtcgatgatgaaagtgaataagaattataaaacagacgttaatattccaaaaggtttgcgttaattttagtaataacgttgcggtttcaatacgcaaaaaatattaacttcgtcaatatagggttgctttgttgttcgaaaaatattttgcgtaatgttattttaactggtgaacatttccagcggcgtggctgattactctatcaatgaatgcgcgcagacacgatataatcctgtgcgtgcaaatccctcaacaatcgcaagttctcttatttgcgcctgattacccgaggctgacctcattgggaagttgtcccttaagtcaaacatccccatcacacgcatttgtttgcatggggcgacgaaagcccagttgtttgccgcaagtttgactcagtgggcaataagcttatcggtgcagaagcgctctgatgaggtccagacttctactcacaaaacagcaactcccacccgtgtaaagacggcaatccgggtgaagtgcagtgccgcctgcatgttgagcgtacgtaaggcgaaccagtcgaatctttttcctgctctctggaaatttttatgcccggtgggtgaagcttcgccaggtccatttatgcatttcggattattaa

SEQ ID NO: 906 - DNA, 139 bp, Cronobacter dublinensis
tcagggcggggcggcgacgtcaggttgacgttggtagaggccgcaatctgagcggtgacaaacactccagcgtgtcttcataaccggcgaaacgcgctatacattcgacactctgcagcaaagcctttaacggcagaaa

SEQ ID NO: 907 - DNA, 376 bp, Cronobacter dublinensis
tttcctcgcacgcccccgtttttcatcaggcgtttcttaacgtcttccggcgggtttgttactgaagacaacccgtctgtcgcgtgcagagcgcgccctggcgcgcgaacttgctcccgatcccataaagtctgttacatctgcccgccgtcctgcgcttgtgaatacctcttccgtgcgtagcatctgccgttcagtcaacgttcctgtcgccctgcggcggggcagagctatcaccggcgggtttcagggagggagcacgatggggtcactacaggcggttgtagagagttgtcagtcgggcgcagaagcgctggcggcgcaggcgcaacagcgcctcgcgcactgggataaatggctgcaaccggtttttgtt

SEQ ID NO: 908 - DNA, 284 bp, Cronobacter dublinensis
acacgaaaattattataggcgcgagcgtcagcagggcgcggttcctgaagcgctgcgcgttgaggctgaaagccgcctgaatcagctactctggcgttatgtgttgttgacgcctgacgcgccagacacccacacgcgctgacacgcggtacggacgtgcaggaaaaggcgcagcaggcaataaaaccgtcgcgcaatacttactttttgtgtctgttcagcgcgtgaagacgccgctatatgacgcagtgacgacgtcatcacggagcggcattaccctcgtg

SEQ ID NO: 909 - DNA, 389 bp, Cronobacter dublinensis
taattccagcgcctgtgtctgatgaattaataatgctggggccagtaaagaaagaaataataatggtgtgctgctacatctcggtttttttatcagcataatccaatcgccttatttatcttttcctgcggctggatgataaagatcagagctttatggatgcgtgataataatcacaataaaatgagggctaatgagatggctaacaagggtgacaaaaaatgaggatttctgcactttaagtcattgaatgacggtgttcgtcgcgcacgcttttttttgcaaatggtgagtcacattaaaccggcgtttgtcgatctgatggaccgacgcgctaggcggcggcgtcgtggatggttttaagaaacaactggcgccgccgtaacagt

SEQ ID NO: 910 - DNA, 270 bp, Cronobacter dublinensis
ttttgtctgtcagaaaagcccaacctgtgttgggctttttttgtttttatctttgtggtttctttgcggcctgaaggtgggggcgctaatgcttatccaccttacaaaaccgttgtgtttgatgtgcgtaaggcaggtaagcggggcgtacctgtcgtcccggttggcgcgttaaacggtgggtgcgctaacgcttacccactctacagcaccgttgcgctggatatgcgtagggcaggtaagcgcagcgcacctgccagccggtcgcgg

SEQ ID NO: 911 - DNA, 100 bp, Cronobacter dublinensis
gcgccagggcgggacgggccgggtgtgtttcccggcccgctgcaaaatcatgcagagatgttaaacctgtcgagcgaaaacggcgtgagatcgacatcga

SEQ ID NO: 912 - DNA, 104 bp, Cronobacter dublinensis
tttgcggttttttcggggaatacgtcagcgtgcaactgcctctggcggcaatcgccagatgtgcaaaacccttccggcaggttttcctgccagaaaggcgtgtt

SEQ ID NO: 913 - DNA, 141 bp, Cronobacter dublinensis
gatgacatatagcggcggcggcgctggccactgacgcgcaggtgacgcggagaactcattagcaggcagagccagcggcgcggcgtcttcatgcgtgtcggcgacaggcgtctgaacgtcagtcggctcgatagcgtctgt

SEQ ID NO: 914 - DNA, 103 bp, Cronobacter dublinensis
gcggaataaacgcccatatatagggtatgaataagcatactatatgcctcgcgagcggcgactggctttccttgttacccgcactcaatcatgagcaggccgc

SEQ ID NO: 915 - DNA, 167 bp, Cronobacter dublinensis
ttcgcaagggcagaagggtcggccgatacataaaagaacgcgtcaaggccatcggcgagagagctaactctaccagtgcgatggacgcatcatcgggaccataaagcccataaaaaagggagcccagggctccctttctcgttcaatgccatcacaacgcgatgatc

SEQ ID NO: 916 - DNA, 115 bp, Cronobacter dublinensis
gcgctttacacagcataaggccctgtcactggacagggcctctttcgttccgggctcagatggcgtcaggggcgggttctggcgagtgcgcggtgacgttgaccggtatgccgga

SEQ ID NO: 917 - DNA, 110 bp, Cronobacter dublinensis
gacagaggtctacagatgtcttgtctacaaatgtctacagattcagatgaccgttatgttgtgtgccagtacgtagggcgggtaagcgaagcgcgcccgccgcctcaatc

SEQ ID NO: 918 - DNA, 125 bp, Cronobacter dublinensis
cgcgcgcggcatgcagaaaggcgtttaacggcaagaattgcgacgtgcgggacgcgacgccggcggggaaaagggcgcaaggcgggggaaaagacgcggagccgtggcggcggccccgcgtgggc

SEQ ID NO: 919 - DNA, 130 bp, Cronobacter dublinensis
ggtgcaaacagcgtatgacggcgtaaaaacagggggtttacagaagaaacaacgggcgtgtgttggtgaaacgcgcggcagcgggagaagatgctaagtgtaggggcaggcggcagcatgttaagctgcc

SEQ ID NO: 920 - DNA, 948 bp, Cronobacter dublinensis
gccccggaaagggcgaatattttttttgcctggcgcatcgagttgaaaaaccatctgccaaaaaagatgattgcggccagtaataaaaaaacgcctgaaaaacctaaaatatctttcatttttactctctgttggcacacgttaccgctacattcgctgcataaacgcgtgtccagggggccgttcctttgtgtgcaccaccaggtagaaatacccggctgtatctttgcaacacgtcaacggcgacagctcaacgggcggggcgggtaacgggcaacatgtattgcccgtcagacgatcctcactacgccgagagacgcgttggcgcatgtgacgtcaggacagccattgttgcatgtcgtcgtccacgccactcgccactaaccgaatcgcctcagcgtatatttgccgggtgccatccaccgtctgctcttcggaatctttgagctgggcgataatattatcggtctctacaggtattcctgatgctatcagtcgtgacaccgctttgcctatcactcggtagatatcatccatgtcttctggcttaacaatgcccattctgaacgctcctgttaatcgaatcagctgcttttgcctgtgcggtcgcaggtattcttgcgtacctgagaaccgtctcaattgaacagaatcataccgggcagaaagacaaaaaggtaacaggtttttgtggcatcttgttcgggatgtgaggacgggtaagcccgggtttgaccctgcggtttgcgcttggtcgtcgcgcagaaggcaccgcatggtgacggatgcataacggacgcggcattccccaggcgcaggataaaacctgagcaacgaatagcgggttatttgagcaacaggatgccgtgtgtttcaggctaattaaaagcaccatgactggccggcgcttttaaccggctgcggaacgcagatacagaaatttatttt

SEQ ID NO: 921 - DNA, 151 bp, Cronobacter dublinensis
tgtttttatcgggtggctgcgcgttttttatgcggcgaaccgtaggggtacggcgcatggggtgatgttcattctggtagcttaatttgtgcgggcagcgccggtattcttatgccaggcccaaatcagagaggagtgacaaggatgaaaa

SEQ ID NO: 922 - DNA, 212 bp, Cronobacter dublinensis
cgcgggcggtgcacgtgtcgcgccgggttttactctttcacaagtcctgacgaagcgatataacgtgggaaggaaatgagcaaacccgcaggagaatatattttcgcgttaacataaaaagcttctcgcgcggtttaaacggcaccatataatttatttttaaaaggcactggcggtaagcgcaataatgcactagcgaaatacgctgcgtc

SEQ ID NO: 923 - DNA, 250 bp, Cronobacter dublinensis
cctcgcgcgatgggtttctaaacggcacctcaatacagaccaatcaggcaaattccaggggggctatgcacgggcaggaaacgtgttggcgggtgcggtgctgatgcgggcagggcactcgcggtacggcgtttgcgtgatgctgcaagccgcgtgaggcgcgcagggggagagtgccgcgagggtgttctgcggggcgtcacgagccccacagaagcataacgaaggcgcgaagcgaagaaaaagacag

SEQ ID NO: 924 - DNA, 183 bp, Cronobacter dublinensis
taatgattattcgtatggcggctaaataagcactatgccgtgacgaggcgaatcagtttctcaatcggggcgcaggcgggaataacccgggttgcgcgacgtttgcgaaagaaaatgcagggaggcgcgccttgttcggtgagcgtaatgctgtcttcgacaggcgaagtgattttaacagtg

SEQ ID NO: 925 - DNA, 170 bp, Cronobacter dublinensis
tcggctgggagccaggtcaattttttgcgtaagctgcgtcagaaaatcaagataatggtgagagaagaggtcggtgaggctgatattaatactgagcgtgaggtcgtagcgggtcaataattctgcggtttcactcacggcctgcgtggtcacaaattcggtgatttttc

SEQ ID NO: 926 - DNA, 130 bp, Cronobacter dublinensis
ccgccgatactctttcgcggggcgccatgtgcgccccttttttatggcgaaatgtgtatagcgaaataacaggtaagggcggggcgacaacgcgcgggcagaaaatggccccgtgaacggggccgtgcgt

SEQ ID NO: 927 - DNA, 111 bp, Cronobacter dublinensis
ctggaaacgggtgatgaagcaagagaaaagctgacggcagaaacaacagcgccctcggaggagggcgcggggcagtcggtttcaggtttacaggggctgttccatcacccc

SEQ ID NO: 928 - DNA, 116 bp, Cronobacter dublinensis
tcaacagaaagtggcgaccttccagaaactggcctgacgcgccgtcgagaggagaatcttccttaagtgttaatcaagaagtgttaatcaagcgccaccagcaggagatcggttct

SEQ ID NO: 929 - DNA, 209 bp, Cronobacter dublinensis
ttgccccaacccccggccgggcaaggcgcgtaacggcgcgggcgctcatgcggatcacgtgttcgccgcgcggttttctggcgattaatgcctgtcaaagcgtgattcagatcacaaaatgattaatatatcatttgccatttacatttttatcacgcgaaataaatttaacgctttgtttataatagattttcctgcctgaacatccc

SEQ ID NO: 930 - DNA, 224 bp, Cronobacter dublinensis
tcgggatggttttttttgatggcgctttgcgcaagcacctggagcgcgatgcaggctaaccggaccggtaacgttgcagaagcgggcgcacacattaacacgacgttgaaacgtctgagcgcgtggacggtaacgacgaacccgacgcgggtaacgaaagccgccgccgccgtcaggacgcatattcgcgccctgacgcgaaagaatacggtcagccgcgccta

SEQ ID NO: 931 - DNA, 105 bp, Cronobacter dublinensis
gtcaggcgatggcgattctctgtctgacggagtatttgcgtactttcctctaataccgaataaccttacgccgcgtttacgatttcattccacgctgcgtcagac

SEQ ID NO: 932 - DNA, 197 bp, Cronobacter dublinensis
cgtgttttactaagaatatcctttccggctgctgctcattgacgaatgtcattctgtgcttttttttaccgggttaatgcctctcccggcttagccaaatgaagacgcatagtctttcgtcttagtacgcggcggttgcataacttgataacgcattcgcacgtcgggtcggctaacggataatcatcgctatgtcc

SEQ ID NO: 933 - DNA, 408 bp, Cronobacter dublinensis
cttcttttattattatctataacgcagcgttgattcggtttccctggtgcttttatcttggatatttatacgacgttcctgtctttttgtttttcgtccctgatatttcacggtgcttgtttttaggagccactccatcaacaagatggaactaatcctggtctatatagcctgtatatcaagcggcggcctattttataagaattatccagatatacttatacatagaattctgctttgtacacgtacacgcagagcaatcgtcttattgcctctatctatcctgtctttccaggcagagttaaccaatagcgccacaaagatttcaaactagtgagcctgatgatgccattccttctgtgggcataacaggcaattgttcagtgggcaactgatacaccttcaatc

SEQ ID NO: 934 - DNA, 393 bp, Cronobacter dublinensis
attcaatatgtaacatggacaccgatttagtatcattcagagaaaattgtgaaaaggattctaaatcgtgaaaaaggtcattcttgttgcggtagtactgttatcagcttgcgcctcttccagcaaaacctacggccccgatggtcgagtcgcttattcactgacttgctctggtatagcccgggactggggaatgtgcctgtcgaaagcaggggacatttgcggtgcgcagggatatgacgttatcagcgttaatggagattccggtgccgttattactgctaacccccagagtgcatatggtggaactactataagtagaaacatgcttatctcgtgcaaatgactaggccgcctccgggcggttttttattgcgcatcgcacgcgcacat

SEQ ID NO: 935 - DNA, 326 bp, Cronobacter dublinensis
gctaatctcgaggcgttatgttggccatgtcataagcgcaagactgcaacggagagaacacgatgagctatacacgttgtacctactgcggctcgcagcttcataccctcgcgaattgccctaaaacgtggagcggctcagcgcgccgcgtgaacctgcgctgtggttactgtggtcagtctggacacaattccagcgcctgcccgcataatgccagcagcgcccggcggcgccatctcaacgatgactttaccttcgactgatcgtgaaaaaattgatttcaaatgcaattatttgaatataaatgatatcaattctcatctccg

SEQ ID NO: 936 - DNA, 193 bp, Cronobacter dublinensis
tttgtccggtgtactggatggtctggccgaaaatatcgatagcgtagcgaatgtgtcgggcgcgctggtcgggctcggcgtggcgcgatacttcggaaatatggtcggcagcatcacaactgcaacagcttctctggttgggaatacagcagcagaagtgggacttgcggaagcgcagctgcgtaacacccag

SEQ ID NO: 937 - DNA, 141 bp, Cronobacter dublinensis
ttcccttgtgctgtgccgctgcccttcactgaggcagcggtgcggtgtctggcgcacggggcagcgcacccctcagcaggggtgagcgcgcgccagcgttgcgggtaaatcggcggcatatcctgcgctgtttgctgtttg

SEQ ID NO: 938 - DNA, 111 bp, Cronobacter dublinensis
ccatattaatggggtaaacctcttgcaatgcttatttagttacaacattcttattggggttgacgcggctgccgggtcaggcgctgatgccgggaaggcattgcaaagggt

SEQ ID NO: 939 - DNA, 355 bp, Cronobacter dublinensis
gggaaccggcgtgctatttgcatgataagataagtatgcatgattaccattaaattctggtaattcagaaacgatttttccggttgttttatctatcacccaaccgcacacccaacgttcgcccccacattcctgaggtaattcaccactccagctcagatagagacggtaatgacctgcaaagttaactggctttaccagttcacgttgcatgatgtgcttccatttatcagtgaaatgttgttgcttgctggcaagcacaatatgttctgtaaatggtccactgcttattgctactgaaaaatctgaaaactgaggattaacctcactggcaaatgctatagcgttggtgcta

SEQ ID NO: 940 - DNA, 168 bp, Cronobacter dublinensis
cgctcgcgggcggttttcagtatctgctacagcaatcgtctggcgttgccgataacggcgccagtggatctataccgataattttcgtcgcggcgcggccgcaggcgatttacgcattacgcgttttccaggagtggggatggagttttttgacgttttgtttgtttt

SEQ ID NO: 941 - DNA, 181 bp, Cronobacter dublinensis
tctctggggagggggctgccagccttttttatttctcgctttcctgccgcttttctccgctttcttgccgcgtcgtctgccgggtttttagcattgcgtgtcttttaagcagtatcgctgtttttgattaatcttttcttattcaacgcaatgcctgccatttcagtttctttgaaatctc

SEQ ID NO: 942 - DNA, 226 bp, Cronobacter dublinensis
ccgtatgccggatggcgcgcaagcgatatcgaagcgggctcgatgctccagccgggcgcgtccggtttttttattccctcccgctcacgcctttcttttatgtctgcgcactcgctcattgctgagaagccgcttgcgttcattctgataaaaataccgcgctgcgcctgcgtatttcgcggttctcacggcgctcaggctggctgtaaaaatatccccatatgaa

SEQ ID NO: 943 - DNA, 684 bp, Cronobacter dublinensis
ttcaacatggcggcgaagcaataaagctgcataaaggattttcttaacatcaggccgtcgaatatccgacggccttttttgttatctgtcgtgcgccacgcctgcgcgtttatccctcaagccagcccgtcgcagcccgatagtcatgactgagccagtcgcctgtcgttgtatcgatgatttaccctctcaacagccctaccagaattggcgtgaaaacccgtttgatggcgcgcggtaaattatttacgctcgccatgttttctttatccggcgggcagcacgctgattatggtgctctgcgccctgaatcctgcgttcgcgggcaaaagccgtgcgtttgcaaaccagtgaaggtcacaacatgaatagcagccaatacctctgggaggccttaaacagcccgcttgttattaagttcgttctggtgctgcttattgcgctctgttgctacgatatgctgcgaaagagaagaaaaaaacagcagcggggtgccggtgtcattgtggacgccgacgcacgggagcggcacgaatggcgctatgcccgccgggcgctgaagggcgtgcagataatccttctcggctggtttttatggacgctcatcagggcgctgttagcgtaacgtcgcacggctgacagggttttattcatccttttatcaacgtctgcgccagggtttac

SEQ ID NO: 944 - DNA, 134 bp, Cronobacter dublinensis
aacccctgcgtgacagcggcgctattatataaataggtataaccgatacatgttttgttcaggcgctcgcatgaggcgttaattccggcgtttcggttggtaatctattgataatcaataattttatggctcag

SEQ ID NO: 945 - DNA, 152 bp, Cronobacter dublinensis
gatgaagaagtgcgcgatatatatttcccgggccaaaacgtttcggaatctctattatgattaatagcaggcgttaaaaataactattatcaccttcaaatatatccgggttgtttaatttttattcattaataaatccggcgggtttccaa

SEQ ID NO: 946 - DNA, 132 bp, Cronobacter dublinensis
aacacccctttcgatccgggcactgacgcgctggcgcaggcctccagcgtccgactcgcgctgtgggtcgcggctctcgcatcgctgctggcgctcggctttagcctgagccggttgcggcgcgaatagggc

SEQ ID NO: 947 - DNA, 275 bp, Cronobacter dublinensis
gcgcgggcaatattgtgtagtcttaaatcagcgcaacgcgcctgtaaaggcctgagtacgggcgtatgcccacgcacgacgacgcgcgctgtggcggcgttcaggcaacagcatttataagaaaggcgggtacataatatatatacgataaccgttgcagttgctggcgctacgcgcgttaaaaacagcgggtttaatcgcataattcacaatgaacgctgtgacaggcggccagacgacgggcccgaaatcgtgttcaggttaggagagaggat

SEQ ID NO: 948 - DNA, 280 bp, Cronobacter dublinensis
tgccagcgtcgcgctggagcgcctcggcaccggcaggcgagatgcccgctaacagatcgaggcttaccggcatggtgccgtcgctgagcgcggtcacctggaattcgccaatctggcgtgagggaaaagcgggacggttcatacagccctcctgggcgtgccgcgtaatgacgtttcgtcatgctaaaggctgctatcgcggctgtgaaacgatactatggcaccccttaatgactttttatcactgacgggcgcaggcccggttgcaggaggcgcgcca

SEQ ID NO: 949 - DNA, 205 bp, Cronobacter dublinensis
ccacatggcgggcgcatggcttgaggaggtcggcacgcctgacgctgaacgatgggtgacggtgtcggcgcaggaggttatcggagccgcgcgccgccacggtttactgggcgattagcgggcggtcattgtcagcgctgccgttacgtcattatgacgatttctgttcgtgatgcagacggcgagcctggcagatacgggcgtg

SEQ ID NO: 950 - DNA, 269 bp, Cronobacter dublinensis
tttaagggcatcaggagagcaacgatgaaaaagacaatggcaggttttttggtggcggcgagtctgcttacagcaaatggtgctgtggcgtctgcgcgacagagcgacgttgaagaggccaatcgtcagcgtgttatcacgttctacgatcgattcttcaatcagcatgacaccgcagcggcggacgtggtggcggatgactaccgtcagcacaatccggaggtccccgacggcaaagcgccgtttgttaactacttcagcggattttt

SEQ ID NO: 951 - DNA, 367 bp, Cronobacter dublinensis
aactgatgcgccgcgacagataacgcggcgcgaaatacgcttacggtcagggttgtccctgcatatcccagcgcgccgatcccatgtcgttatagacgcgatcgtcagtaaaaggcgggaaggcagcgcgcccggcagcctctttcagcgcctgacaataggcacggtcgccatccttaataataaaattgaccagacggccatctttctcgaaatcaagatggacggtgcagcgcttgccgttccaggcatgcggtttggcgagcgccgcatccagcgcggttttaataccggccgcctgcctgccgtaaatgtctttatcctggacgcgccccgtatttttataaatacacggatcaagcgcgcg

SEQ ID NO: 952 - DNA, 457 bp, Cronobacter dublinensis
tgccgtaaatgtctttatcctggacgcgccccgtatttttataaatacacggtccggagagcggggcgcaacccgcgacagtcgcggccatcagcatcaccagcaacagttttttcatgctaattccatttaaaagttaaacgtcatgagaagggcttcgcctccagtatgccatgcgtggtaaacgcgcgtgagccgcatcggattcccctactatttataaggggggacggcggcggcatccctcagcgcggtaagcgcgtgccggtatggcgtgcggtttggtcatgatgtaaggcaggcgatagtcacgtcgttatgaggattatctgaaacttgcggatcgcggcagcgttaaaatattttgcggcacacatccgggcagaacctgcgcaggcaggcaatactgaaagtctttttagtcgttccgtcagcggaacgcgcgattgccggatca

SEQ ID NO: 953 - DNA, 174 bp, Cronobacter dublinensis
ttaagacgcaaaagagtaacgcgcttcgctaacgctggcaatatcccggcgcgacatgaccctcgtctttttacgacaatatgtaaatacgctttacccatgccgtgccaggcggcaggccgtaccgcgcgccgtgacggcctgccatttccaggggtttttctcatcatcgag

SEQ ID NO: 954 - DNA, 118 bp, Cronobacter dublinensis
attgtggcgcgcctggctcgtcatgagcgcaagatgcgggataaacgtctgcgcggtgtcgcctgcattttcagaaaaaacagagcggactttattttcttcggaaaattttgaggaa

SEQ ID NO: 955 - DNA, 102 bp, Cronobacter dublinensis
taacgcacaagccatataaataatgtgatctgcgtaaaccgtctgaaacgaggctgacgcccggttaatccccgcgcctgatgaaaatatttcccctgctta

SEQ ID NO: 956 - DNA, 127 bp, Cronobacter dublinensis
cgaggagtatgcgggcgaacgacaggagcgggacgcggtgcgcgacatgctggggctcagcccgcgcccataaaaaaaattggccgccgtcgcgtcagggccccgcaacgcgcgggggtggtgccca

SEQ ID NO: 957 - DNA, 136 bp, Cronobacter dublinensis
acggagccggacgggccgtggcacccggtacccgttacgtcgccaccgcaagggcgcgtattgcaggttgatgcgcgaaaagggcggtaccgcacggtgcagcaggccgttaacgccgtgggtgtttttcccaaaa

SEQ ID NO: 958 - DNA, 213 bp, Cronobacter dublinensis
tctctccatgaccatgtcgggttttctcggtgaaaaggggttgcgggcctcatgtaagcgtaaaaccgcccacgccgcaagccctgccagcgtaaccgtgcggacacatcatcgcctcccagtaagccgcgcccggcgaggtttttccgccgtttcgcttaacgccatttttttgtcgataatttcttctttttgctaaaaaaaccggcacgt

SEQ ID NO: 959 - DNA, 258 bp, Cronobacter dublinensis
cgctctcctggtgtaatgccgggccagtgtgtcacggccacgggcaggttcactgttattgtctgtgctaaggcaaccgatagtagtcgaaaccagacggcggcaacacccggcggcgggcgcagtcgggctttgcggcaaaaaatgctaaaaaatgcgtgacaacgtcacgaacaggacgccacgctggtcgcagcgtgtaagaaaagggtgaaccgcacggtgggtttaaggcattatcaggactcgcacacgcca

SEQ ID NO: 960 - DNA, 192 bp, Cronobacter dublinensis
aggctaatttttaattaagcgaagcggtaaataaacattactcaggcttaaacattgcgctaattatttattttgacggaaaaagacgctcgcggcgcgacaggtgctacaggatgccacgtcatgtcaccggaaggcgtctatcctcagacaggcagagagtcactcagacaagtaaaagtaaggacacgg

SEQ ID NO: 961 - DNA, 149 bp, Cronobacter dublinensis
gccttcgcaggagggcgagggttcccctggcgtccacacccggcggatttacgtaaagcagaataatccgccgcggtgggggaggggagcggcgctttggttatcaataagttaggcttttatgacgcttgtcacgcggcgcaggcgga

SEQ ID NO: 962 - DNA, 153 bp, Cronobacter dublinensis
tacccgatgcagagcggccaaccctgtcacgtattacgatcgtttttgatttaaaggatcagtttggcgatccggaacaggcgtcggtcgccgttaattttcatgcccgccagccgggcggaggagggttatgaacgtttccccggagtacat

SEQ ID NO: 963 - DNA, 220 bp, Cronobacter dublinensis
aaacgcccgttcgaccgccaaaaagaacgataaaaaccctatttagttacaacatactttataagatccaccgaatctgctgctttaacatcagcgctgtctgtctggctttccagtgaaaaaagcgcgcggcgtgaaaagcccggtaaacagacgataaaaaagccagacaagctggctttgtacgggaaacaaaaagaaaagggcagtgacgtcagat

SEQ ID NO: 964 - DNA, 491 bp, Cronobacter dublinensis
ttttatcggtcgggatatttcacttaaggtttaataaggtgggaaatatatttttcctggcgagtgagataacgctgaaatgaattaattacccgcgttacaggtttaattatttttactgcggccagcgcaccagcgccctgtgacgcggctctcgctttgcgcccgggccgcgccaaatgggaatattcccacttaactctcgtcattgtgtcgataatataatcacaacaccttcgcccgataccgattatttcacgcctgcgtcgctggcatttcgcgcctgcgaaatataacgcgtgcagccgcgccattacggaaatagaaccatgcgtttaaccgggttttgtcatgaggaaagtctgatggctatgattacagggagtgagcatggttaaccgaattcgcgtcttctcgcaagccgcgccagagtcgctgctgttctgggcgctgaaaggcgaagaacgcctcggcacgccctttcgttttga

SEQ ID NO: 965 - DNA, 734 bp, Cronobacter dublinensis
gacctgaagtgataaatctctcaattattttgaggaataaaatgcgggcaaaatacatcgagaaaaactgggatgcaaaaaccaccattgagaatgaagtgtttgaaggggaggatttcactggtgttgatttaaactcacccatcttcaataatgtaacgttccgaaactgccgcttcgaaaaaacaaagttttctgacgggcgattatatcattgtcattttgaaagttgtgtttttataggcgtagacttacgtaatgttacgattggggctggcggtggtttgtataaaaattacacttttactaaatgcgactttcggaaaggctacttttatcaaccagcgatatctggttgtttttttgatgagtgtaagtttaaaggtacagattttaaagccagttgcttcgaagattgtaaatttaaaggcaagcttgaagatgttgtctttcatggtaaatacgttagtgatttaacgcaaaactctagagttaacactatgaaaaatattgatttttcaatgtcgtcatggaaagagatttgttttgataactgcgatctttcatcttgcataccgcctcatggtacaacattcagtgaattactttgcccctctccatatcataacgataaaaattatttatgttcagatattgttgaataacaacaggcataattggtgaaagagaataaatgcataatgacgataaaaatatatagcatcatgagcatt

SEQ ID NO: 966 - DNA, 354 bp, Cronobacter dublinensis
tctaacggatttacgcccggggcatttataaagggcaacaaataatggcctcattctatcgtatgagaaatggtgtaaaaaattatgcctggggcagccgaacggctttgaatacgcagtttggcgtgccgaatccggatgagcagccccaggctgaaatctggatgggggtgcatccggcagggtgttctgaaattgaagttggcgcgaacacgatttcattacaggacgcgatcgcaaaatcccccgacaccgttttaggggaacggacggtggaaaaatttgcagggcttccgttcttactgaagatattgtctgactcctgcggactttcaaggacccctggtcacgcgg

SEQ ID NO: 967 - DNA, 177 bp, Cronobacter dublinensis
gtatcggcctcctggcggaaacgttccggccaggccggatcatagttttcaagcgttatctggcgtgcggccattgaggtctcctgaacaggctcagcccggttgcagcgtttccatcacgatctgcgcgcccggcatcataatggttaacccgtcgataagttcatgagccgcgtc

SEQ ID NO: 968 - DNA, 231 bp, Cronobacter dublinensis
cgtgattaatgaagagccagttcaggtgcccgccgggtcatccgtcgtggcccgcaccgatgctccgcaccgctacgttaatgcgcaaaacgaagcgctgaccttcaccatgacggtctttgagccgcactaaagcgcctctttacgtgacaacgtcaccttcaaaccgcttgcacagcgtcaggcgattttgcgcgcctgcgctgtactggacgtcatccacgcacgcca

SEQ ID NO: 969 - DNA, 104 bp, Cronobacter dublinensis
gtaacacgggcggcgtccagcttgccatcaggaatggccttgccatcgtcagtcagaatgacccgcgcgcaggcggcatcgcgctgaaactccaccgtgaactg

SEQ ID NO: 970 - DNA, 128 bp, Cronobacter dublinensis
agcagaaccggcttccattgcgggcgtagctgctcaggcagcagggtgaacagcggaataaagcagagcgtggcgcagtaaacctgagcgcggaggaaggccgatgacggtttagctgctcagatgcg

SEQ ID NO: 971 - DNA, 193 bp, Cronobacter dublinensis
gcctgcgccctgcggctggcgggtgcgctgcgcttacccgccctacagttaacgaggcgcacccgccctacataaatctgaccgtcccgcccagtacactcggcggcgcggactgcacgcagcgaggggagcgtacacgcagtacgtgacccgagtgagtacagcccaggcgcaatctgacaagcaagccagg

SEQ ID NO: 972 - DNA, 116 bp, Cronobacter dublinensis
ggatcggtgattctcaattattaatgaataatgcgtaattaattacccgcagggggaacgcggtgtgttagcgtgaaccctgctcttctcttcccttcatttcgcctgttgggcac

SEQ ID NO: 973 - DNA, 326 bp, Cronobacter dublinensis
caaaacaaccccaccattccaaaacacccccaccacgcccgaaaaactccacctctcgccagacaaccctggcgctgccttaaccttcccgactacgccatctgctgcatgtactgcgctacggtggctctggcgccctgcgacgacaaacgcgtaaaggcggcggtcacgtcggcgacaaattccggcgctgccgccaggtcgtcgccaaaaatcgccgtcagcccgagcagcgcttttacgcgcgcctcgccgttctcgctggcagaaaccgcctgctgaatcgttgtcagcagcggatcgcagacgtcaatcgcgttacccgc

SEQ ID NO: 974 - DNA, 126 bp, Cronobacter dublinensis
tacgcccgggttgtggacggcgggtgcgccaggggccgggcgtgcctggattggcctgacgcgttgagcaattccgggtaaaagccgggatcagacggtggcgggtttgacggcgagcttttcgtg

SEQ ID NO: 975 - DNA, 102 bp, Cronobacter dublinensis
tgcttttttgcgcgaaagccgcattacgcgccgcaagagaggttaacgggaggcgcgcttgcgcctttctcctgcgttgtccgtccaccggctcgcgcgcgg

SEQ ID NO: 976 - DNA, 105 bp, Cronobacter dublinensis
acaacgcctgccgccgccttgcgccgtctggcttacatccggtcacacccgattatggatatctcttctgcgtgccggatgatgatgttgaaaatttatcggttt

SEQ ID NO: 977 - DNA, 1050 bp, Cronobacter dublinensis
gtttgacgtgtaaagcgtattttatacaacggttaccacgatgcgttcttttgtcgtttcggcatacaaacagaattaccaggcattcactgcaaattatcaacagcaataatatttatgatcaccaataacccctgaagttcagtgaatatattgacagataaaataactccttttgttaattaattttaagttaagacgtttattttactgcgcatggaatcttagaaactttacgttaatagaaaggaatgcgtcatgctgcgttgtaaattccatttgaatagccagtcgctctcaaatctgagctgccctggcgttggcttttttccggcctattcaggcgttgagggcaataaacgaaacaaccccggttttgttaccacgccaaacgaaggccctcttccccccggcaaatattatattgtggatcgccctaaaggttatggctccgccattaaagattacgtttcaagccaggtaagcggctcagaccgcaatgtctggttcgcgctctaccgcgaagacgacaagattgatgaccataccttcatcgagcatgtccagcgtggcgctttcagacttcaccctgcgggttatgccggaattagtaaaggatgcatcaccctgccttcaaaagaacactttattaccttgcgaagcgcattactggcttcaccgcccgtcatggtgggtgcctcgctaatggcctatggcacaatacaggtatattaatgaacatcctgaaaaacatactcatttggtatttttacacagccacgtatgccattattcttaccttgcttttcatcataatccctgaggattcactctatagcattatctatggcgcacatgtcgaaacagatgcggttgcatgggataatattcatataacgatattattaatttctgcacttttcctgaacagcctcgtaatctgtttcttttcacgcttaacgtttgcacggttcaaatgagcgcccttttaaatttactctcctccgccctataaaggtaaatggttcacctcacggttgccgaacaaaa

SEQ ID NO: 978 - DNA, 120 bp, Cronobacter dublinensis
ctttgcattactctcctccgccctataaaggtaaatggttcacctcacggttgccgaacaaaaaacgcacaccctggtcaatgcaccttacatacgaccggccccgaaaagcagataaac

SEQ ID NO: 979 - DNA, 220 bp, Cronobacter dublinensis
atcccgcagagataaggcgtaacgcgggctattatcgaggcggcgggttaataaaaaataacattaattaacaatatgttatggtgtgtttatttttcatggcgggtcaaaaaaacatcccattgcgcacggcagcattattccagcgcatactttacaacgcgccgctttaaattatggcggttgacttacccttagcacgcggcctcgaacaaacgcc

SEQ ID NO: 980 - DNA, 159 bp, Cronobacter dublinensis
ttgtcatttctgacgatgccagacgcgggctgacaccgggtgccagcgttatacgcgccctgccttgtcgtgcgtctgaaattaatcggtgaaacaggcgcatattattaaagctcttcgcccccttgccgatgaaccagatagccgataccaaccgct

SEQ ID NO: 981 - DNA, 112 bp, Cronobacter dublinensis
gctgactgacaccgcgccgcacccctttgacgatgagcgcgcccggacgctggcgcgcatggcttgaaacgctcaacgcggtcggttttctcgatccggtgacgcgcctgcc

SEQ ID NO: 982 - DNA, 236 bp, Cronobacter dublinensis
cagtccagaatatatcgcgcagtgggtataagcggcacggcggataaaggctgttcccggcgcgttaatcgggccgggctctttttctcaacgcgtcgccccaaataacctgtcactttccacggtttattattaagcaccagtatccgataaagtgtctattaatatacagttcaaatcatttcgccgcgcaatgatgttactgaagtcacttaattgaaaaagagtctggtgca

SEQ ID NO: 983 - DNA, 347 bp, Cronobacter dublinensis
tgcctgcgtgactgatgcatccctctcatttctcctgctgcccgcctggcgcggctttctgttgtcttggcgtcactcgcccttctgtacgctgccagtggcgacaaaatatgacaaatcacgtcataatatgaatccacccccatcattaacatcctgaaaaatatccgccagccggtgtgcttagatattaaaatcacaactacaacgaagcgcaaaatatcaccaaagccaaaagcaaccaggcaaataaaattattatcaaaacaatcatctccagcacatccgttatttcacaggcaatttcacttgcgtcattaaatatccttttctacagttagaaatac

SEQ ID NO: 984 - DNA, 141 bp, Cronobacter dublinensis
tttcctttttttgtgtcgatcaccgcgcgtgttattacgccgggcggctgctgaaaatccaggtatcgtccgtttggtcagtcaacagcacctcctgcgcctcaccgctgggcagaacaacactgatgatctctccctgcg

SEQ ID NO: 985 - DNA, 172 bp, Cronobacter dublinensis
aacctcgctgagatccgccgctgcgccgcactgacgcataccgccgggcgccagcagcgaatagcggttccagcggtcttcacgggtcgggagaaattgctgcgggttaagcgggtccgcctgggcggtcgcgaggatcgcgcggcgctgctcccgcggaagaaaaaaaaaa

SEQ ID NO: 986 - DNA, 165 bp, Cronobacter dublinensis
gcgacgaagttttcccccatcaccggctgggtaatacaggcgcgcccgctggcgtcaaacgtgccggtaagctgccctgacgccgcgcccgtaaggcatgatgccgcctcgcccggcagcgcactgacgcccgccagcaggcttatcgctatcgaaatccgcttc

SEQ ID NO: 987 - DNA, 374 bp, Cronobacter dublinensis
tcaggtcgccctgcccggtgtttttttatgcacttaaacgccatacttaagttaaattttcttcaccatgcgcctccttcgcgtctcgttcggtttttaatcagtcttgcggattgttgcgccggggccgtccgagttcccggtttagaaaaaataatgcgcttttcggcttcagtttcttcttaatggcaacgcgataatgattgcagaacgcaataatggggaagatatagttaaccgcgcaattaaatcagccaaaaaatcggcaataactgattagcaaaaataaactttctttactcatactgccataactggatatttcagggcaaaaccttaccaaattgccgctacaattatcgggtacgcatcag

SEQ ID NO: 988 - DNA, 124 bp, Cronobacter dublinensis
atgccggttttgcgcactcaccctgcgtcagatcaatacgttaccgtctggccgcgccagtgacacgccgcgcggcatttctcgtcaggctgttgaatttcggcctttttccttgaaggtcaaa

SEQ ID NO: 989 - DNA, 129 bp, Cronobacter dublinensis
cagcgcgttcatgcccggcagcacggcctgcggcgtgagcgtacgcagcgcatcgacatagagcgcgtttttacgcgcggcaagcgctgccttctctgcggcgctgaacgcctgcgctttgccgccata

SEQ ID NO: 990 - DNA, 110 bp, Cronobacter dublinensis
gctgcgcgtttgtgaaatacctttttcaagcaccttaaagtgcgaagatttaaaatcatcgccataaatttgtgtaattaaattgcgaataacatccatatttatggcgg

SEQ ID NO: 991 - DNA, 313 bp, Cronobacter dublinensis
cgtgccctgcaggtctggcgcatttttaccagcgtctttaccggcgtatcccgttcccatcaacttgccattacgaaacaacttcccactgctttgatgataaatccaggtcatgttccttttcctgttaaagccaatagcgcagggatagtagtcgcttaagcgaagcaggagaatttcttttagtttctgtatgtttaaaaatatgtcgattaaaccgggtgttaccgtgtgacgggcgatgtcagcaacccttacgcggtgagcgcgcctgagaaaatgatacggtcgcggcgggatttaaaaagggaac

SEQ ID NO: 992 - DNA, 125 bp, Cronobacter dublinensis
gctgttcccccatgagtgcgctgacgcctgcacatacaggttacacctaaaagtatgttgtaactaaatatcccgtaaaacgtaactgccgcgaacgagtgtttgtggcgtgatgaatcaacagg

SEQ ID NO: 993 - DNA, 119 bp, Cronobacter dublinensis
cgccgacgagttagaaaacggcggcgcgcgacaggccggtttaccgattcacccgcaagtcataaaaaaaccaacccgctgaggttggttttttattggcgaagccgcgcagcaaagac

SEQ ID NO: 994 - DNA, 115 bp, Cronobacter dublinensis
accagacggaatttatctcaaattgcgcccgattaaaggtgcaaacataaggcatgcttcgcgcaattagcgcggcgggaaatggcgaaagcgaaagtgagtcgggaagatagtc

SEQ ID NO: 995 - DNA, 113 bp, Cronobacter dublinensis
agcacgcagcagagctttaggctcgccgtcaaaaaactatctttttgttcgttatttttcttttaagtcaatgggttgcatagagaacacgccttcagcgcgacgtgtgaccc

SEQ ID NO: 996 - DNA, 128 bp, Cronobacter dublinensis
cttttgggtggaaatctaagtgtggatcaggttacccgcgggcgccagtcattgagtaagacgtgccgctgcgttttgcaatggcctgtttgctcaatgaattctcaacataattgctatttttatcg

SEQ ID NO: 997 - DNA, 149 bp, Cronobacter dublinensis
caggatgacgggatggcgggtgcgcaagcttacccgccctacaaggtaatgccgcgttgtatcctgttacagggtgttgcaccgcagcgcacccaccacgccaaacaccagtaaacgtttgccgttttgtagggtgggtaagcgaagcg

SEQ ID NO: 998 - DNA, 206 bp, Cronobacter dublinensis
tagtgcctgtatcgttaagcgctcactaaagtttgcatcttccgcgggaagctgttcgggctggccaccggtaacattttgccggaaatcagtgcttcacttcggtaccccgcccgctgaccattatcaaaccggatagacatatccgccgcatcactcaggtagtactgtttaaaatccacgccatcgcgtggtgtggtgtgaca

SEQ ID NO: 999 - DNA, 882 bp, Cronobacter dublinensis
agccggatgcggcctggcactatccgtagcgtgagttcgccttcacgcagatcctgctgcggggccagcacgcgggtcgttacccagccgtgttcaatgatgcggtcctgcagggtgccgataatcatattaatgccctgcacgcccaggcagtgccccaccgcctggtccgccaggcgctgtagcggcacccagtgaggcagcgcgtctttgcccgttaacgtcacgcgcttgatagtgaagcaggggttctcatccggaaactgcaaatgtgaggatgacgcggtggcaaccgggatacgaatatccggcgcctccgcggcgagccgggcttcacgcgccttttgctgttgctgctgatgctggaactgttcttccgccttcggcaaaagagacgggtcgccaggcgccgcaataagggtgacgggaagcgtcgccagcactaatatcagcccgcgcccaggaagcgcttttccctgcatataaaaatccacgtaatgaaaataaaagaaatattttaggaattaaccctattttatcgctcccgttaatttagtatcaattgcctttatatgacgcagtcacataaaagaataaagcgtttaagagacgcaaactcacaatatataccgcaaataatttcacttaggccgccgtaaaataatcaaagcggcaatgcgcataacagacacgcttattatttacttgctcagccccagtttcacttaataaacctgccgcagataatagttatttccagtgaatatcacgccgtggaaataaataaccggttgttattctcattactgtaagcccggcgccgttactggcgtttaagggttgcggctatttcgccgcgcggaggcggtttctcccgggcga

SEQ ID NO: 1000 - DNA, 206 bp, Cronobacter dublinensis
ccggtacggggcgtcgcgggcgagaccgtttcctgggcgatgttttgctgcggggaattcctcgccagcggcagccacatcagccacgccaccagcgctaacgcgcctgcggtggccagcgcaggttgcagccccagccgtgaaaacagcgctgaataacgacataaacgtgctggccgaggccgcatacctttttttaatcagcg

SEQ ID NO: 1001 - DNA, 462 bp, Cronobacter dublinensis
tgccggtgctgaataacgacataaacgtgctggccgaggccgcatacctttttttaatcagcgcaggcattaacgcctgaatcatgccgatactggctccgcctgccagggcggtgatcatcagccccgtcagcgacgccgtaaacccccgcacgacacaggcaatgaataagagaaaaagagcggccaggatgccgcgtaccgctccggctctcgccagcagccacggcccgctgaaggcggccacgcccatcatcgcgaccggcaacgtcgtcagcaggctaaacgctgtggcggatagccccacctcgcgctgcagcacggtaaacagcggcccgatggacgccagaatggggcgcagattcagcccgaccataaatgcgataaaagcgaagagcaaaggcgatgaggcaatgcgtttcacaacaggctccttataagccgtgatcgccccccgtgggt

SEQ ID NO: 1002 - DNA, 111 bp, Cronobacter dublinensis
gcacgccaccagcgccggtgccgtctgcgggttcagcgtatagcgcgtcataaaggctttgataaagccatcctgcaccgactgatgttcgtcatcgaccagcgccatcgt

SEQ ID NO: 1003 - DNA, 208 bp, Cronobacter dublinensis
taaagctcgcgatttagcgcgttgccgcaataaaagagcgtggaggtcggatcggtcggcgcgtcaccgtgggtcagtacgtcgcgctgatgatcctgcatcgcctggcgcagcgcgtcgatatgctgcgcgtcgcgctgcgcaaacagcgtggcctgcacccgcccttcgctcgtagcgaaccgcgcgtcaacgtggaagcgccagg

SEQ ID NO: 1004 - DNA, 285 bp, Cronobacter dublinensis
taaagctcgcgatttagcgcgttgccgcaataaaagagcgtggaggtcggatcggtcggcgcgtcaccgtgggtcagtacgtcgcgctgatgatcctgcatcgcctggcgcagcgcgtcgatatgctgcgcgtcgcgctgcgcaaacagcgtggcctgcacccgcccttcgctcgtagcgaaccgcgcgtcaacgtggaagcgccaggcgcggaaggacgtctcgcggcgcagcgtatcaagccgcgccccgataagcgtcgagtcgggcgcgagcccttcccgc

SEQ ID NO: 1005 - DNA, 166 bp, Cronobacter dublinensis
gtcagaggacggtaaaatgttgagcaaacctgcggagcagaacgcccctgcgaaagcagacgccgctgcgccgcagcaggacggtaaaatgctgagcaaacctgcggagcagaacgccggagaaggcacagtaatccgacgtcatctgtcactgccctcattcggg

SEQ ID NO: 1006 - DNA, 105 bp, Cronobacter dublinensis
ctccggctccggctccggctccggcacagtaatccgacgtcatctgtcactgccctcattcgggggcagtttttttctctttcacccgcctcgctgccgtttttt

SEQ ID NO: 1007 - DNA, 125 bp, Cronobacter dublinensis
gcggccaagctgtttatatttcacagaacgcccccttctggcatgagcgtcgggcggcccggcacgacgggcgtccgggtggagtgaagggtattaaggagatgcgtcatgttgtctgccttcct

SEQ ID NO: 1008 - DNA, 135 bp, Cronobacter dublinensis
ccgccagtttcttgaccaattccccgatgcgtaattactgtttatttacgctcaataaatcaaactgcaattattcagccatccttaagaaatatctgagcaatgaatgagcgaataatctgatttttccaaaag

SEQ ID NO: 1009 - DNA, 137 bp, Cronobacter dublinensis
accctccgcccttgcggcgaaaaaatacgcagcgcgttcgtttcggataaaaaaagccgctattgaagagcggcttttttattggcgatttatttaacacggcttatatctgttagcgccgacataatggcaggctt

SEQ ID NO: 1010 - DNA, 405 bp, Cronobacter dublinensis
catgaccgctgttgcaggccgcgaagcatcttaacctgttcacgatggcagaaattaacgcaagtaaaatgacagcggtgtcttatctttttatgacgcgaatattgatttattacgcgcgacgatgatatttatccgctttcgcaccgatgccttttccgaaaaacagttatcgccgcaatagttcaacgggtaattattttcgcgcctttgaagatattaataaccggattgcacccacgccggcatggtgtaaacgcagacgccacgcgcctttcctcattaaaatgtgaaaaaagggagtgctgcgcaaagacgattgcggcctaaactcattcacccaaagaatatttaataaaattaaatagcccttaaatattatttgaaaagaacacaccacagcgc

SEQ ID NO: 1011 - DNA, 182 bp, Cronobacter dublinensis
ccatgcggtcagtcgcattgcgccagtagctgctggttatagcggtacgcgagacacactagctgctggctgaccacgcccgcgcgatgatatccccaccgcgcagtcaccggctggcggccgagccacccgataaacgccgtacaggctgcaagcgagatggtggaggtatcgccgacata

SEQ ID NO: 1012 - DNA, 217 bp, Cronobacter dublinensis
gcgtggcaatatgggcgacgcgcccggcgtgcgcaaccagccgcacctcggcgcgatcgcacccggcctcaccgcgcgccagcgccttaaggtatgcctggatcttgtctcgcgcgttatcgcccggcacccagggcgtgaaaatcttccggcatgcgcagcattgcaggcgtgggtggccggtctgcgtcacgccgtagcggatggtctctggcga

SEQ ID NO: 1013 - DNA, 430 bp, Cronobacter dublinensis
tccggctggcaacaccttcagtgaagctattattgtgcatacgcgctcggccagcctgacgtttgggatctcaccggatgacggccatattttatggtcagcggataccggcaactataacccgacgttcgcgcaatccttatccgccccgcgcctcgataccagcgccattaccgatcgcgacaatggtgcgcacacggtttttgtcacgcaaaatccatatttcaaagataaaaccgatatcagcgccgggaaatttgttctctcgctgtttaataaccgctcctgcgtcggtgcagacggcaaggcggtggtacggcccatcagcacgcctgcgacagaggccgcctcaagcgctctgcccgtccaggtgctgttttacgcagtcgatctcgcggccaacaccgtgacgcaaacgggcgcggctgtc

SEQ ID NO: 1014 - DNA, 102 bp, Cronobacter dublinensis
tgcgccctgacgcgcttacaccccggtaaccggccagctgacgggcggggcgcagttcagcgcgggtctggcaaagagatagccctggaagtacttgatacc

SEQ ID NO: 1015 - DNA, 617 bp, Cronobacter dublinensis
tgcgggcttttttattatgggtttaacgcgttgtctccagcggccttcccgcccatggctttctgcatcctttgccgcacgttgcgggacgtacaccagcgacgcggcgtctgacccaaccgtcagaacaatctcccctgagaatgttcgttaccgcgacccgcctttagcttatcgatgacgccaaaagtcacgttgcctgctggaaaaatacgcctctctcgcgcggctattattcgtttactcaatatttgtgatatgaccggctctggctgacgcctctgcgctccgacatacaggtggctttatatcgcccggctgataatacgccacgaaatatatatttctcaggtgaatccttacagggttaacgtaaatctcacaaaccatccggcaccctgtattacgttaaaatgcgggatgcgaagagtagtaataaattcgcaaacaggcatgtcttgttacttatacgcgtattgatataaacgttaacaggcatacaataaccgccgcaataaacacggtcatgacagcgcacaggatcgcttttaaaaaataaacaagtaacacggaagtttacctgacaaggaataaaaatgggcttttatactcgactc

SEQ ID NO: 1016 - DNA, 262 bp, Cronobacter dublinensis
actgataccataaaacagactactcaaaaggagccgcgataatggatattgaaagccttattgctgcggctaaccgcgctcaacaggcccttgaacacaatatgggcaattattccccccctggtatatgggtttcttttttgacggcgtggggcgcaatatctccatgcgtctttaaacagtatctcatgatatttaacgatgaattccaaaacggaagtttacctgacaaggaataaaaatgggcttttatagtcgactc

SEQ ID NO: 1017 - DNA, 111 bp, Cronobacter dublinensis
tgcgaaaatagtcagtattgaagccacgccctgtttacgcgatacacgcgtcatggcggattttttagtaacgggtgtggatacgcgagtgacttcggccaaaacatcctt

SEQ ID NO: 1018 - DNA, 312 bp, Cronobacter dublinensis
gaaagtcctttccataccataggatgcattgtctggcagaggagtcggaatcttcgcaaagtggcaaaagggctatttctgcgcgacgaccagcttaaaattcaagctcgtggcactgatatgctgttggtcgacgcgatcgatatcaaccgactgctcccctttctcattaacagcatgaatattagccagtgaaagcagcgtatcttccttagccataaagcgcccacgcacgtccttgcgtaagtcgaaatgcattttcagtgcaggccctaccgacgcctcctgcatcacgttgatattgcgtaagaa

SEQ ID NO: 1019 - DNA, 165 bp, Cronobacter dublinensis
ctcaacgttgggcactatcagctgaaaaccctcaaggtggagcatcaccgcattcagaaggtgcagattatcgctgaaagcgtacctgttgacgtgatgccagaagacgtataaacccataaaaaaagcggccgccagggccgcttttcctgacgccgacatcgc

SEQ ID NO: 1020 - DNA, 1125 bp, Cronobacter dublinensis
gtaaatacatttaccgctgccagagtaggacaaacggatgagggaggcaagggggtgaggccgtcgttctttctgcgtgttaaataacaaataaaattaacattcaataagcggccacttaacaagtgaaattaataatatcactcacctggttaattacatttaaattttataactactgtcgcaggagtttgactggataaaatgattacgtcgcgcattcgctattataacattgatcatttttagcataatatctgcttaacgctggacaacgcattatctggagcaccacaaaagaatttatacatcgttctacctccagccgtgcgattattcgggacaccagcaagcctgaactttccaagagattatttttcgttcaacaataaggagcatagcaaaccgtcacagcaaaatacatttgcatcaacaaagtcaaatataaaaattttatcgaccctggtctgataaatcgtgatgagtactttgtcaggtttaacggatatttaatgctttccagggagttttgaacattgaaaactgccctatcgccctcccgttaacctgttatgcagcgcgcacacgcttagattttcttaagcttcttctttttccatctcacgaccaaccattcaaattcctggtaggtggtttcagaatggatatgttcccggatagcccgtatcagcgactcagcaatatcccacgtttcgataaccgttgtataagaggttctcttgatcatctcctcgttatacataccctgcctgatacctaccgccactcgctcatagaaattcaaaatgtattggaacttccggcgctcctccatttcatcttcagtaatactggcacctggacctggaaacacataagaacgaaatgatttacctgactgatgaactcttttaagcatatggagcgaatcaatataatccctgtccttgcggctttcaaaaagaaaattagcagtttgcgtttttttggcagttttaacgttatagataatcgtgatgatagccaccactacaccgataaaaaccagaatattactgattatttgaagcgtgacagcatccattgtcatagcggtgttccataaaaaaaggcgggatacccgcg

SEQ ID NO: 1021 - DNA, 209 bp, Cronobacter dublinensis
cagcatccaccacccaaaaaccgggatacccgccttacagaggttaacttgatttaaaaaccatcaaattcatcaaaccacattttcatgttacctcccgaataataacgactcgcttgcagtgatggcttacttttcagtttgtaaaatcacctttgtttgaattttatcctgctggcattaacgatgtaaagtaaatccatttgcac

SEQ ID NO: 1022 - DNA, 105 bp, Cronobacter dublinensis
tgcggcggccacatcagcggcctctgccagtgagagcccggtcccgcaagcgaccgcgcctgagcatgaaacccatctgctggaacggctggtggcgcttgagac

SEQ ID NO: 1023 - DNA, 425 bp, Cronobacter dublinensis
caaataccattaatatgattcccaacagggccccaaaaacattccagtacccgtcactgcctgagctataaagggtcagcataacgcgaataaagaaaatcaggttaaccagcacagcaagcgaaatgagtcccagataaagctgcaatgcacgtaaatatccccttgcgacccacatcatagccggaatgataagcaggcaaaaaagaagattggttatcaggacaccaataataaatgcgggctgcggcaacgccaggctatcagaaactgccacccaaagattaacttgtggaatggcaaaactaatcactgacagcaccatactgaaaattaacggcaaaccaaaactgcgccaaccgactggcaaactgactttttctttaagctgctttttgagcaactcaggtgcgtctgatcctgtg

SEQ ID NO: 1024 - DNA, 202 bp, Cronobacter dublinensis
tcttaataaaaagatcgcgcagcattactcccgccttctggtaccttgcccatcgccgccatttacttcagggtgagccgcccggcgctgggaaaaaagaatggtcactggatagtcccttattagtctgaaaagaagtatttccgcgaagtcgtaaaggcaacgcttcatgcggtcaccttcagaatgatatcaaccacct

SEQ ID NO: 1025 - DNA, 102 bp, Cronobacter dublinensis
tggtgtgttgtgtggggtaacatacagagcaggcttagggaatattgcactacaaccagccaataataaagttgcagatagtacagcaactttaatattagc

SEQ ID NO: 1026 - DNA, 133 bp, Cronobacter dublinensis
tacctggatattcattaacggttcctctgcaataaagcgatatgcatgacgtattgcagtgtccgtgccagtttttattttattgatttttaatggtttatattttcattattgtcaaaaacacaattgcgga

SEQ ID NO: 1027 - DNA, 130 bp, Cronobacter dublinensis
ctcgcttttccccacccgttttcccacaaccgattacccccgcttaccagtcaccgtttcgtgttgcttatcaatgttgcccttgcgtctgcaagcgcaccgccacgggtgacgatgcgcccttatgaca

SEQ ID NO: 1028 - DNA, 146 bp, Cronobacter dublinensis
tggcgcgttaaatttttcgatttatgcgcgtttactttcgtttagggccaaaaacagcagagagatgcaccaggcaggtgcggcggagataaaaggaaaataacggcccggaggaggtacaagaggaaggacagaaaagaacgcgg

SEQ ID NO: 1029 - DNA, 106 bp, Cronobacter dublinensis
cccgatcgccaagaaagccatgcagccagacgaccgcgccgcgcggcgccgcatcaggcgcgcacctgctggatgagacgctgaaacgcctgcgcgccatcggtct

SEQ ID NO: 1030 - DNA, 115 bp, Cronobacter dublinensis
ggcagagcccgcgtaccacgccctgtcaaagggttcatgagacgcgataaagcggctgcaactggcgcaaacatgccgtgtcgtcaggcgtcaggagccgcgcgcggatcacccg

SEQ ID NO: 1031 - DNA, 103 bp, Cronobacter dublinensis
ggttcgccccttgatagcaatcacgattggcgcgccgggagccatccccggttgcagcgcggcgatcctttttattccctgcgcagccgtctcgtcgtgaccg

SEQ ID NO: 1032 - DNA, 116 bp, Cronobacter dublinensis
aaggctatcgcgcggccttttttcctcaataaccgtgtagcgtaaattccgctatttttggcgcgcgaaattgctagcggctgaattaattaacccgctaagttttgcaccctgtg

SEQ ID NO: 1033 - DNA, 111 bp, Cronobacter dublinensis
cggccctcacgccaacgcttttgcgccgctggggcgttacgtcagcggcgcttaccgccagttcgccgctctgttatccgcagacccgtcagtgggctggcgccatttatc

SEQ ID NO: 1034 - DNA, 296 bp, Cronobacter dublinensis
cggggcgttcatggcagcgtctccccaggaattaccttctcgccggggcgcagcttgctgacgcctgccgtgataacccgatcgccagggctgacgccgccggtgagaagaacgtcagtggcggtataggcggcgatggtgaccgggcgcggctgcgcctgctggcgggcatcaatgataaacacgacagggcggccattcagccgggtgagcgcggcggcgggcaccctgacgcccttctcccgcgtctggggcagcgagaccatgacgctcgcgcccagcgccatcgcgcgttt

SEQ ID NO: 1035 - DNA, 100 bp, Cronobacter dublinensis
gaataaccacacggatccctgccgcatcggcctgcggttttaaccaggcggcgcgttcgcgcagcagctcgctcaggcatatcgcctcgcgatcgagcgt

SEQ ID NO: 1036 - DNA, 155 bp, Cronobacter dublinensis
cttttatttcgcgcctgaaagcgcgcgcgacaacagcgactgacttacacagcaaaagattacaggtgcggtattatgcaagttaaaaccgttgtcggccgtctgactggctggcagaaatccgacgcgcagacttatcagcgtctttatcatca

SEQ ID NO: 1037 - DNA, 168 bp, Cronobacter dublinensis
cgggtgatgtaagaggtgcgcacgcgcctgaaagcgcgcgcgacaacagcgactgacttacacagcaaaagattacaggtgcggtattatgcaagttaaaaccgttgtcggccgtctgactggctggcagaaatccgacgcgcagacttatcagcgtctttatcatca

SEQ ID NO: 1038 - DNA, 171 bp, Cronobacter dublinensis
gacgctggaaaaacaggccgccgccagcgtccccggcattgtgctgcacagcgaaatctcggataacttcgccgggtttgctgagctttccaacctgtccgggctggatatgggaacgctgctctctgaagcgctgaacgcgcctgacagctctgcgaacacagccacgtc

SEQ ID NO: 1039 - DNA, 120 bp, Cronobacter dublinensis
cgctgtcggtgcatctggcccgtctgctggaggaagatcgccgcgcggaggcaagcgtgaaaagcagcgttatttatgcggcgcagggagacgggctaagatcgcgtcaggcggcaggct

SEQ ID NO: 1040 - DNA, 200 bp, Cronobacter dublinensis
cacagggtgcagttccgccacggtttttattatttcctgataccctgcttctgacgccgtgccggtcgctgataacgcactgccgctgtgcagatacaacacggcgagcgccagtaatgccacagacttcatattaccccctgagatccctgagataacgggattaaattattgttattgcgcgcatttttttaaccccc

SEQ ID NO: 1041 - DNA, 119 bp, Cronobacter dublinensis
cccctgagatccctgagataacgggattaaattcggtggtagttccgacggcggcctgaagcatgatctttatcaggatttactgatattactgagattgcctggcgaagccgttgtgt

SEQ ID NO: 1042 - DNA, 278 bp, Cronobacter dublinensis
gttgtctgatgagcgaaccgggcatcagtctacccgcaagtttcgcctttatttgtcggcaaaagcttttttacgccacggcgtacaccgtagatgctggcgtaacgcttaacgccagtgaattagcacgctaataaaaaaaccgagaatatattcttaccgggctcatgtttgtaccgcgcaaattaattaacagcctaaccatcctgcctttgttaatacgatcacacatagtgaaaaaaattaaatacgcaactcaatgatttaacagcggagcg

SEQ ID NO: 1043 - DNA, 119 bp, Cronobacter dublinensis
taaagacggtgacaattttgcctgggaaaaagatactcgcctgttatttaccgcgctgggcgaaacggtgaaggaatatcatgacgtgcgcaaccagtttatttcgctcgaaggcgcga

SEQ ID NO: 1044 - DNA, 242 bp, Cronobacter dublinensis
cgcctggatacggataaaaaatggcaggggagcaggtacggtttttgtacaggttacagggttatcagggcgataattttcacaaaatgcttaccttttgcgtctcctgtacaaccttttttctccgatttgacaataaaaatgcaatttcggtacagaattatctgcaaaagcaaaaataattattaaggcaactcactgaaaaatatgattatgataattttttaaccagaaatgcggca

SEQ ID NO: 1045 - DNA, 222 bp, Cronobacter dublinensis
gtgccatcaggctcactacgccgggcggccatcgctatcatgccctgcgccagcgcgataacatcccaggcggcggtgtcgtcgcgaccgatggccgccatgacgcagcggtgaagggccgccagcgtttcctgctgatgaggcgcaaacgccggcgccgcttcttcgccatcaagggcggcggcccccggcccccgcgggaaatcgcctcgataatcgcct

SEQ ID NO: 1046 - DNA, 150 bp, Cronobacter dublinensis
ttacgtggcggcagagctggagaagctcgtcacggagcggtatccgctgacgtaacggcggctgcccttttcactgaccgcatcccggtggcgtgaataaccggttgcgccccggaagaggacaggaacgccagcagcgccctcccctcc

SEQ ID NO: 1047 - DNA, 135 bp, Cronobacter dublinensis
ttgtttgcacaagttttcatcagcgccacaggcggagatcggaatttccgttttgtgacaacggcctgagtcggcgtgcgcgcttctcgtcgtttttacatccgtgagacaaccttatggatgcccattacctct

SEQ ID NO: 1048 - DNA, 213 bp, Cronobacter dublinensis
catttttacccccacacgctgtcccaactggctttctgcgttcttccgctcatctgttattaatctgaatagcctgttttaacttaaaaaaaccataaaaaagcgggcataattcaggaatgatgcccgcacgctttacttctttttttagcaattcttttacgcccaaagcgcattattcatcacgcagcttcagaccgttacgttccattt

SEQ ID NO: 1049 - DNA, 501 bp, Cronobacter dublinensis
tagttgatcacatatttctgacatcatttcaatagttgtgataattctgtcctgttctgcagttggtggcactggaattaaaagttccgtaatatcattcatttttaagttgggctgtaacccagagttattgaacctcgattgataaatattcaatacggtttcacaactcatatatttataataaaatcttgatttatgatacggtctgatagcacaaactcgctgatttaataaagatctatcatataaatttgggcacacacatactttaaggccatcgctaatataaggtctagtcatggctaataacaaatcatcacatcgaaccaacgagtcactataaatattcaaaaaatcaacaggtaagtagtcattagtatgagcaaaatcattaacacctacatttgttattttaatacactttgcaccactttcgttattaaagtcttcgcttttgaaagtgcttccagaaaatacataagcgatattagctaaacg

SEQ ID NO: 1050 - DNA, 459 bp, Cronobacter dublinensis
tcaacttttgctactattctggcttgcatatactcagatggaagagcaataacaatattgccaatcacgctctgatttatagcaggtacagatgttcctgattgatacttcgccatatcaatggcgttcaggattaaaaaaaaccactcaagatttatttgctgaaaaggtcttatccctaagcagttattatcaatagctgtttttttgacaagtatccgccttttatttgtagcaatagctccaccaattttaggaaatattaccgttcccggctcggaaacatttattttcctctgaatagccgattcctcggagatagtattgtttgtagctttaatatatttttcatttccttgaagattcatgtcactaactttacacatcagaatatcttcagaggtaatgccttgaatagaagttggaaaccctgaacctatagcccatgaacccaactcg

SEQ ID NO: 1051 - DNA, 380 bp, Cronobacter dublinensis
tattcactgctgcgggtatgcagggtgttaataagagtccggcacaagcatttatctttatcataagcacctcgcccacataaaatttaaatcataatcgatatcaatattgcatgtttatctttctgacaacttaaaaagttgacaaaatcgggtagacatgaaggtaaaaactttttatttatcgatattagccagtttcaattctttaaagcctggtttatccttcaacgttatgagcgttttgcttatcggccatttttcactgatatgcaagccactgttacgcttgaaggatcgtcaagatgaaattaaaggcaacacttgtactcattttcatagtgatactggctatcgtcttgtattccacgccgggtggc

SEQ ID NO: 1052 - DNA, 199 bp, Cronobacter dublinensis
gttacgtcggttatgtcgatgttgtagggtgggtaagcgtcagcgcacccaccttaagaaaataaaaccttaatctcgccgaacgcggatgcgagggggttattgcggctgccctttggccgcgagccgggattgttaagggtttgtagggcaggtaagcgcagcgcacccgccattccgctaacccgccatcccacgc

SEQ ID NO: 1053 - DNA, 149 bp, Cronobacter dublinensis
ggagagagagccgatgtgattcattgtggtctgttgctggacggcgggtgcgctgcgcttacaattcaaaaacacacaaacatggcattaccgcacgcagggtgagtaagcgcagcgcacccgtctttccgtcattcaccagacctgac

SEQ ID NO: 1054 - DNA, 144 bp, Cronobacter dublinensis
agtggagagtgggtgcgctttggtaaacggtggaggcgctttgttaaatggtgggtgcgctacgcttacccaccctacaaatgacaaagccatcgcgccgtagtgccgtagggcgggtaagcgaagcgccacccgccatcttcc

SEQ ID NO: 1055 - DNA, 110 bp, Cronobacter dublinensis
tttggcaaggcgggtgcgctacgcttattcgccctgggttgttccgtttgacggcgatgcttgcacgggcctgcggaagagggttttgtagggtggacaaggtgcttggg

SEQ ID NO: 1056 - DNA, 200 bp, Cronobacter dublinensis
taaaggcaggaacaggcgcgtaatggacgatattctgcggattgcgcgcgcctgcccggcgatacgcttacctgaaccgcggctaaagcgaccgcgtggcggaaacgccgacgcgcaggctatggtttatgcaggcgcgcggaagaaaataacccaaccggagtgagcatgtcgcaacctgacccctggcacgtagtgat

SEQ ID NO: 1057 - DNA, 156 bp, Cronobacter dublinensis
actggtctggctgaaagagagcgcctgagcgcgttatcgcttaccctgccgtgccgggtaagtgaagtgtcacactgcatgtctacgcaggccgggtcagcgcagcgccacccggcatcccacaaaaacgcgccgttactcttccacgccgggtga

SEQ ID NO: 1058 - DNA, 115 bp, Cronobacter dublinensis
tgactaaagggccgcatggccctttatttttttctgccccgtgccgttaataccgacaaacacggccagaaggcgtccgccaacctcaaggttttacaggcttttttgcggcctg

SEQ ID NO: 1059 - DNA, 182 bp, Cronobacter dublinensis
cgcagccgcgacgataaagaggaataacaccactttggcaggctgaagatgcagctcgaaatgcgccgttgcccagaccatttcatataagagaatgcataactgataaacgggcgcgaccagcagctgggcggccataataaaaggcagcagaaagcgacacaggtaaaacgcgttcagca

SEQ ID NO: 1060 - DNA, 117 bp, Cronobacter dublinensis
gtcgcacgctattattgctcacggcaggaatttcgaggagctcttaaaaaaggtatacgcgaaaattgctaaaaaacagccagagaggtggtagtgctgaaagtgtgcgcagagaag

SEQ ID NO: 1061 - DNA, 114 bp, Cronobacter dublinensis
tgataaaataaatggcgctaaaccggcataaatatgtaatctttattttacagttaataaaaaggcgggtttccccgcctcgttttcacggtgccttatgcgtgagggttttcg

SEQ ID NO: 1062 - DNA, 208 bp, Cronobacter dublinensis
cggtttttttatgggcagaaaagcgtgtcggagcacttgcagctatccaccgcagcagtattacaagtacctactacgcccttacttatggcggataagcgcaacgcgaacgccgtgagcccatcgaagggtgaatgcgcaagcttgcccacccgacaacttcatacgcaccctgccgctcaaaaattagtgtttcgcgagaagcatt

SEQ ID NO: 1063 - DNA, 603 bp, Cronobacter dublinensis
cccaagaccactttgcgtccaccactatcaacgagctatagacatcgccatttgacctaacttatgttggagatgctctaaggtgtttgtaatccaacacaagggaactttgaagggtatgcgcacatttttgaatcagtccttgctcctgcttgctttatcgccactaagtgtctgctcccatgctgtaacctttaaaatttacaacaaacaaggggttgagtgtaattatagtattaatgaacatggattcgctgaaagtgaagatagcggcccaaaaggaacgggagtctgctgggatatcgatatgatgagaaaagctgacaaatttataaaagataaagcactcaaaaatgagactgcgcaagacaaaggcatcaggcttatcaaagcaagctttaattcatgctctttaggctcctctacacaattaacaccttatgaaaaagtattatcatacgcaaagatcataagtgagtttaaaggtgatgggtacgccataaaccgcatatctgatagtttcgaaaaaggaaaaaatgccataggggtagcagactttgagttttgccaacgtgtagcactttccccttgagtatcaacgat

SEQ ID NO: 1064 - DNA, 664 bp, Cronobacter dublinensis
ctgtaacttattggggctgtcttgcattaagtatcttaaccaactcatcaagattaagattccggtccggatagtttttaagccatgcctcgaaaattacatacatacgctgataaatgggcatacgtggcgacggtgagtagaagctacgcccagcgaaccgctcatatacacctaactcattggaaagaaaactcgcaatactctgtggccgggcctcattatttccatcaaatccgctaaagacagggtttctaccatacggggccgctttttcctcaagtatctgtcgttcactggcgtctaaagccgctacgccttcctcaataaaggaccacatttcaagtatattgctgacctctttaacttcgtcaggtatttctctgtcattaaacccaagatagcttccatatttccacgtaatagcccactcgtttccggtatctatggcattacttatcagtgttgagtcaataccctcttcatataattttaatgagcgatgtatctcagtcagcaatgtcaaagacaccttttcggcatcggtcagtttcatagggatctccttaacgatacctgaacgcattagatttgcttaaaacttagactactcagtgtagcaccgacgctctgttacacctctttaagcaggcagatgttcaca

SEQ ID NO: 1065 - DNA, 389 bp, Cronobacter dublinensis
cgagcaaatagcgcagctgtcggccattgcagaagcggcgaacgccctgtagtcggatatcgacagccagcgggagatgttttatccgcagtggacgcgggcggggatattttatttgcgggtaagaggcgcaacacgttacgaagtcaggaagaatgaaatgatgatttaactgggctacccggctgtcgtggcgcacatccacctgacccgacagtcactgatatttggctcgcatagcctgcaaaccggatccgccgtagcttttgggtcaggtaacagcctgaagcacaggggagtgatcgtacaggggatagctcgtaaagaaacgtgacgctgaggcgttacatcaaaacacttatcgggaataaaaagaaaggatacgcaag

SEQ ID NO: 1066 - DNA, 101 bp, Cronobacter dublinensis
gtctcaagcctaacgactgatgtacacccgccctaccggagagctcctaattcgcctgcgccgggcatgcggtgaagcttcgctaatcctcaaaaaacgtc

SEQ ID NO: 1067 - DNA, 1288 bp, Cronobacter dublinensis
ctagcgccatcgtttgagtaggcggccttttttagtttataaaattaagagacaaatctaatgtcacataaacaacacacttcgccacgggtatttcgcctgatcggcactgtaggcgcctgcggcacgaataaccgcagtgaagttaaaaccattcagactatgatcagtgatgctggctataaaacgataactggccggacggttatccccaatgggatatgtaacagcgatactattgaaggcatacgttggtatcagcgtcttttaaacctttcaccaacaggcttaatacatcctgtggaccactgggttatagaggcgttgaacaattcagtcgatatgcactggcggccacgacatgtgagcgggcccctaagagtaagccagggccagtttacgttcgataatgaaggtattgattacattaccgcggtcgagccttttcgccagccgcagcgaatgccacaattctcccgcatcttacattggcccggtacttttgcatcgggtgttacgctgggccgaggatacgacatgggtaacagaagcgcgggagacatcctgttttgcttacgacaagcgggcattgaggaatataaatctcagatttgtgcaagagcgtcaggattgaaaggaagagcagcaggcagtttcgtgcaatactatggacgtcttgtaggggaaattacgcattttcaacaaataaatttgtttgagctcatttatccaaagtatgttaatctggctaaaaactattatttaaaatacacaaaccaaaaagtggttataaacaacgccacagaatggtcatcgctcaacataaggataaaaaacgtgtatgtagatatcatttttcagggagtcgatgatattaaatcactcgttgcctgcgttgcaaaaaatgatagcgcgcaactgatcacgctaatcggcaagacaccaacgtatatgaattatgaaaataatcgcaatcgcattggacatctgcaatgaaaattaaacattacctcttcggattcctttttttttacagctgtgcatatgccactcccttttttaaaggcgatgaaattcctcagtgtcttgccctgccccatgcagaggatacacagcaaaagtgtaaagagaacgcgctaaaggcatcagagcaggcattagtaaaaacggttgagcaattacaggcgatgatcgatgaaaactacgacgatccgtttacattagacgccgactcccccgttaaaatcagcgaagtatttaaggagcgcttcagccagtcacaaacgtt

SEQ ID NO: 1068 - DNA, 178 bp, Cronobacter dublinensis
ggtgttgcctcgttccgtgagacattgcgggatggcgggtgcgctacgcttacccgccctacattgttgcggggttataacatgcgggagcgcggtttggttacgggcatgtcaggtttgcgagggtgattccgggatcgcgtgaacatggaccggaccccacgggcataaacaaatt

SEQ ID NO: 1069 - DNA, 157 bp, Cronobacter dublinensis
ctgagcctgaaatgcctgtcaaaaaggatggcgaaagcgcccaccataataagaaagcgttttagtggcaacctgcccgcaaggttgtaattacccgccgtcactattgggttttaaataataataacgactgccgctccctgaattaagcgcggcg

SEQ ID NO: 1070 - DNA, 1027 bp, Cronobacter dublinensis
gatgagaaagcccgcttatgcgggtttttttgttaatggagcatatcttatgagacatgttgctgttgagccttctttgctcacaaactggacgttctggtcttttgttgtttcagccttagtggcatttttctcattggggcccaaactatattcatttattattaatcttaaatcaaaaccggaaatatctctgggaggaatgattggcttttcccatgtcattggcgtacctaattgccaaatatttctatcaatatcaaataacaacaataaaaacctcaaagttaaaagtataaaacttgaattcaaaggatacttcggatcgcatactctcgaagcaaaaaactattgtaaagatcaaaacacaaactcagcaatagttttaacaccattcaccttaaaacaaaatcaggaatggagcaatacaaccttttttcttggtagtatgagcaaaaatcttgaaatcaaatacagaaaactattaaataaaatacaaacattaaggaatgaatatttttcgctttcaaatcaaaaagatataaataatagcgttgcaaatacaccttcccctccctcaaccgtatcatcaccttttatagtaacatcagatgttcatgaaaccatgatgagtttatatgaggaacttaatatctggaaaagtggaagctatgatattaaggtgcacttaaccacaaacatgggcaccatctcttcaccagaatatagtgtattgcttttagaaaatgatgccgaaacatttgacattcagactgaaaattatataaacggcatttatattaatcccaactcatgggcgtgggtacctatacgctacaaagaggaataactcataaaaataggattgctaagttattaatttataatcaacgaaataaaaatttatttgttttttaattatataaatactaacaggcttttaatagatgtcttttgacaagcatgtcgtgtaatacagcgacaacctttcccgcttcatctggcatgcttgctgaatactctgtca

SEQ ID NO: 1071 - DNA, 357 bp, Cronobacter dublinensis
attgtcagccccattactgcaactggtcactccccccagctttactgctcacaaccttacgtagattctgctttcgtcttaagccgtattgccaccacattcccgcctctcacaaaaattaaagaaatcgcgaggtaatttaatccccaatgaatacgacgataaacagaccgggttgttacgcgctctccatgccacagatcgcatgtctccggtttgatcagtaaagctctcgccacctctgcataaatcaccttcaaaaaataaaccagggcacacaggcgcagcgtaatcgctgttacggcttgccccctcacaccaaatcccccaccatacccacacaccattctccatctg

SEQ ID NO: 1072 - DNA, 126 bp, Cronobacter dublinensis
cgagcggacattatctgtaaccgaaaaccgacgccagcgcagatgctccaaaagatgacctgaaatctttcgtcccgaatagccccgcgtaaatggtgaataacgcgcccccaaccgttttaatat

SEQ ID NO: 1073 - DNA, 146 bp, Cronobacter dublinensis
ttacccgtcgctaaaccgcgactctgaagcacggttcaatgccttttccccggcgcccccaaattctcctttaaaaaatccttattacgcctttttcgcgtccggccacgggtacgcctgctttttcgcgcctgtgccagctcgcc

SEQ ID NO: 1074 - DNA, 129 bp, Cronobacter dublinensis
tttctctggcgggcgaatctcgctgattcgcccgccctttcactctacaacagcaaaaatatcacgccatttccactaccgacgagcccagtgataccgggaaatatcgccgtttcacggcgtcatttc

SEQ ID NO: 1075 - DNA, 190 bp, Cronobacter dublinensis
ctgcaaagggacgccgggataaagcgcaaaaggagagtgaaatcgtgtgtaaagcactggcgcaggcgaacggtgaagacaggggaaaaggcaatcaagagaggctgatggtgtagggggaggattatcagggaaagtatggtgcatccgggaggattcggcttcgcctcatcctgacgggccacggcac

SEQ ID NO: 1076 - DNA, 130 bp, Cronobacter dublinensis
cgatagccgtgttttctacccgtttatcagccggttagcgataacgcgagcgacgctgattgcgctgcttatcaccgcgccggccaagcttaccgtgagcggccccggcgttcttttcttcactcgcctc

SEQ ID NO: 1077 - DNA, 163 bp, Cronobacter dublinensis
tattcgtgaatggcgggtgcgctgcgcttacccgccctacgttcggaaaattacatggggtgtccagggtgggtaagccacgcgcacccgccctacgttcagaaacttgcacgtggtgtgtagggtgggtaagcgacgcgcacccaccttttttatggcttcc

SEQ ID NO: 1078 - DNA, 157 bp, Cronobacter dublinensis
gagtcgctgctgtcccgctttagcgctgactattcgatagctttcgaagcgccgcgggcggcagccgaccggggcttgcgattgaggtcgatagtttgtcgcttgtcgccgaatggccggcgggtgcagtggtcgggtatcgggaaacgcagacgac

SEQ ID NO: 1079 - DNA, 272 bp, Cronobacter dublinensis
caggccataaccccttaattccaggtcattggcagccccgccggacggcggttactatggcggctgacgaccctgcgaagacaaggaaaagtgaagcaatggtacgcacactcacattatttcttctgacgatatcgctggcgctcgcgggtgttgccgttcaggcgcaaaccctccccgtgccgacgatggaaagctttgttaacgatccggctgacctcctggcgggtcaggaacatgccgcgttaatcactgacgtatcctcaatctat

SEQ ID NO: 1080 - DNA, 136 bp, Cronobacter dublinensis
tttggcatcctgcgcaaaattcttcacctgctcaggcgacatattacccaccactaaaaactccccgggcgtgcgttttcaggcgatcacgataggcaaggatctcctcaagcgtgatatcaggcagcagttcacg

SEQ ID NO: 1081 - DNA, 100 bp, Cronobacter dublinensis
gacgtccacctccggccagggaggcgagaactgattttttgtccccttgcggcacgtttgctctccacttgcctgggttccaagacaccagccctgcgca

SEQ ID NO: 1082 - DNA, 252 bp, Cronobacter dublinensis
ttctggcgtctccgtggcgcgtcgttattccgttttatcattccggtgaatgaccagatatttcccgccccgcagagaaactattagccaggcaatcatattgcactggaatatttcagagatcgcgcgccgcaggcagccgatggcggtggcgtatcgctttgacattcattggaaatacaggcaaaaagggtgaggtctgtctcttctggcccgcttttttccccgctctccctgaccgacgttgtctcg

SEQ ID NO: 1083 - DNA, 147 bp, Cronobacter dublinensis
tctggcgagctatcagcatctgcccgcttttttcatagccataactatcaacaggataaataaagactgaaccacaatcgtttcgtcgaagcactgccccatcaggcgctccggtaagcgttggcttcccggtattcatgcggttgg

SEQ ID NO: 1084 - DNA, 231 bp, Cronobacter dublinensis
gattgtttttaataaaatgataacaacgcgcttttcacgcacgtcaatttacgaattaacgcaagccattaaataatcaaccgggcaaccggttcggaagatataataacgcattgaacattattagccgcgcaatgatatgcgcgttaccgcccgccagcggcaacgcacacagggaaggaaagaaacaatgaaaatgcaaaaggaaaaggcagcaggaaagcgcggtta

SEQ ID NO: 1085 - DNA, 132 bp, Cronobacter dublinensis
ttccgtggacagaaagatgaaaaggccgctacagccacaggcgatgctgatagaggttgaataccgcgttgtcggcgacccggcgagctaaaagcgacatcggtaaggaggctttttgcacgcgcttcggcg

SEQ ID NO: 1086 - DNA, 373 bp, Cronobacter dublinensis
ttctctgcgccgggcgcgcttatcgctttggctgcttttacagctagatcgacggcgcgttaatcgctttatctgacatgcatcatcacaatatcgattcaatagtataatcgctttatcgatatcatcactctgtcggggcgacagatgcctgcgatttaacaggagggttgaatggcggttgtccacactgccgcgacggtgaatgccgattatgcgctaccatctcgcattttataggtggcctgcacgttagctgtcccgcttaataagacagagcgatgctttttaattttatcagcaatgcattggggcttagttaagccagcctgatattcatgcgtgggataagcagaagcgtttttgtgcggtt

SEQ ID NO: 1087 - DNA, 108 bp, Cronobacter dublinensis
gcgtcatcaaacgccgtgtgttatgcactattcccgccaggccggtaaccacctctctggcgggaatttcgtatgacttacgcgagcgcacctaccgatgcgcttacg

SEQ ID NO: 1088 - DNA, 170 bp, Cronobacter dublinensis
tttcgtcgtgtggtacagcaggcttttctgcataagagtgagcccgataacttaccgctgtgcgtaacgcagggacacgctacaaatcaggtagccatggtgtggcactggatgcagcggaataaaaaagggcaccgttgcgccaggtgtcgtgtgattgcgttaacccg

SEQ ID NO: 1089 - DNA, 150 bp, Cronobacter dublinensis
gcgtctcgtaataataaaaaatgaaacgatgaagggcagtattagtggctttcataatgcgctaacgcaatgaaattgggccggtaatggcggctttactcgctctggcgaattcggtagggtgtggcagcactttactgtcaggtctcc

SEQ ID NO: 1090 - DNA, 163 bp, Cronobacter dublinensis
ataccccgccggttatgaataccgggcaggaaaacacggctaaggcagcgaatgccagggggttacgcgcccgccgcggcgtcctacaatgcgcctgcggcagaataacaaaggaaagaggatggcggctccagaagagtacgaaaaacaggcaacgcttgcg

SEQ ID NO: 1091 - DNA, 137 bp, Cronobacter dublinensis
cgaatcactgaacgacgcgctgacgcgtgcaatgacgcttttaaaaaacacccccgcgcacggcgaaacgctgcgcgcgctggcgcaggcccgcacgctttccgatgggccgatgacgccgcaggaagcgataccgc

SEQ ID NO: 1092 - DNA, 113 bp, Cronobacter dublinensis
gctgtttcggattatgaccataacgctttcgcctgcgccatgcgcgagaaataccccggcgattagccaaaaaaaacgggaggcgcagaggcctcccgttcggttttagcagc

SEQ ID NO: 1093 - DNA, 318 bp, Cronobacter dublinensis
gaactgattcctttaacgttatcgtgttatgacgcccgctaatgccctgcgttttagatgaaaaaccggcctgccacgcctgtgcatagacaggcgcggtaatggcagagcggcaattaatcccgatttatttaatgcaggagaaacacgatattctgtgacgcccggcgcactccccggaattaagaaaatgactacccgctcaaatccgcggcagtaaataagcagcgaggaataattcagaaaaggattagcggcaccctttttattagcggaataaacctgtcgttaatacccgcatgcattgtcaccgtcggg

SEQ ID NO: 1094 - DNA, 100 bp, Cronobacter dublinensis
cacacacacactgtgtcacacacacacacacacacacacacacaccgcccaggaagacagctacgtgtttgtcgttttcgagcgtaacgacgccatcgac

SEQ ID NO: 1095 - DNA, 113 bp, Cronobacter dublinensis
cgcgctgataatgcgctaattttattttttgatttttttaaaccaggtgatcaattaatgtagtactgctaaatgggattttagcacaatttaactaacgccctggttttact

SEQ ID NO: 1096 - DNA, 145 bp, Cronobacter dublinensis
cacggcaaccagtctgatgttaggtaatgtcgccgatcgccgatgcgtatttattcacgagcgatgcaagctgagtctgttacaagcgcgtttcaacgccgccgcgcgggtatagcatccagaaaacaccgttcgtatgccgcat

SEQ ID NO: 1097 - DNA, 172 bp, Cronobacter dublinensis
gcagaaaatcgattttctaatcacaatgccaatgacgttgatttttacgcttatgattattaaggtaaaaaataaatcattaaaataagtaagcattgtttacgcataataatgctctcattgcccgcgctttccctgctccggtaacgggcttatgctgagcgcgcgatga

SEQ ID NO: 1098 - DNA, 126 bp, Cronobacter dublinensis
ttcctcaaataataataccaacggtaattattataacagtggcgcgatttacaactccggcacgatcaacacgctgcataataccggcacgatcgcaaacaccaataataacaccacgcattattt

SEQ ID NO: 1099 - DNA, 109 bp, Cronobacter dublinensis
agctcacgggcattttttccacgttaccgtatgaaggtaaatctacgggaattgaggttgccgcccccaaatacgtgcgcggtaccctgcacaggtaatcctggacggt

SEQ ID NO: 1100 - DNA, 544 bp, Cronobacter dublinensis
ccaaaaacccccaacccccaggttgccaataaccggcaggccgccaacaaaatcatggcttaccagcagacggaagcgaggctcttcgatcttctgatcagtgcagagcagagaaaatcggtcgtggatcccacgggcaacgtactgactcttaatgacgcgcaggcgttttacctggcgctcgttattctctctttactggagcaggtgcggttttccgtatggcgtttagatattcttctgctgcgaaccttgctgcgcggctcctcacgggcccgcaagccattacatacgcaaaagccatttaaacttgcggcgatttacagaacattcaggcaattacgccaacagacgcgatatagccgggccattcttgatgaggaaatcaaaaaaagcgccgaagcgctgacggagcatgacattgcgcagattgcgcaaagggggaaagctcatccgtaacggcgatagcgcgcagcggcgtgtttcgctgcgcgcccgttcttaatggggttgcggttgcggcgtttcctgctccggcttgtcg

SEQ ID NO: 1101 - DNA, 115 bp, Cronobacter dublinensis
taagcaactgcgcgccgatagcgccaacagcgacgccgtcgcgccctgattcgcgccccataaattaccccgtcctatatcattattcatagacccgcttgatgatgctgtactc

SEQ ID NO: 1102 - DNA, 142 bp, Cronobacter dublinensis
tgatgcttaacagcggtttcccgacgcgtttacgcgccgtaacgtgtttacgccttcttagctgaatcgttaaagctaaaactacgctacttcacatattctcattccacaaaaccgacattttcattttcatcacgatatc

SEQ ID NO: 1103 - DNA, 109 bp, Cronobacter dublinensis
ccgttcacaagggtgatatggcgggtgcgttccgcttacccgccctacatccctgccgtgtcggggatgcggcgggtgcggctgcgcttacccgccgtcaggccagcca

SEQ ID NO: 1104 - DNA, 168 bp, Cronobacter dublinensis
ttcgcgcgttcaaactgcgtggcgaaataccagggcgcaggcgctggaaagcccgccaggccgctgcgctcaaggcgcgtaagctgctggttggcgtaaagcccggccgcgctgaaagcgataagcgcgagcgccaccgtgccgcacaaaacacgctgccacagatgg

SEQ ID NO: 1105 - DNA, 122 bp, Cronobacter dublinensis
atttacgtaggtcagcaccgggctcgtgccaaacgcggcggcagaagcggcaatggttgcgctgcctttcgggtttaccattacaggctcaaaattcacgggtttgccttttaccgatggcg

SEQ ID NO: 1106 - DNA, 287 bp, Cronobacter dublinensis
aaaggatcccaggtgacgcatataaaatacaccccatcaatatgtggcgctttttatatttaccagcccttggattgatgaggattttatgtttcagttcaggaagcatcaagaaatataaagtctaaaaaaagaacagcacaaggctctcacgccagtaaggaataacatactgacaataaagaaagtatttatgttgatgcttatttacaaacgtcaatgcgaacaaaaatatctcaattggataaaactggaattgggaaccaataaatataaataacatccat

SEQ ID NO: 1107 - DNA, 122 bp, Cronobacter dublinensis
ttcattttggctgtgggaatatttctttcaaattcggatttggcggtgttccacgcgttcgtgcagacatctgcgggctggccgtcggcggtgcactcttccgccgtggcgtagtaaatacc

SEQ ID NO: 1108 - DNA, 104 bp, Cronobacter dublinensis
cgcacaggccagccgccgttgccgggtgcgtttgcgcgccctgcgccgccggaggacgaaccgcctgaaaccgcatagcgcggcgcgtcgttttcccgcgcaga

SEQ ID NO: 1109 - DNA, 104 bp, Cronobacter dublinensis
gttgcgcagcctgcgcgtcccgccacttaatattcatgcgcttacgccggtcgggtcgcatccggcgcactgcggctgtggccatcacggcgtcggcagaacgc

SEQ ID NO: 1110 - DNA, 124 bp, Cronobacter dublinensis
gcctgatttattcgtacccaggtatcgttaacacgatccgacgcttattttcacgtttattctaaaaaaataatgaaaaaatcctgcaaagcggcgtaaaatagaaacccgcagagcctccctg

SEQ ID NO: 1111 - DNA, 133 bp, Cronobacter dublinensis
gagcgccacatttaaatgttaaattcacgccgagaaatataagcataaaaacaattaaataaaatagcactgcgcattccgggctgacatataataaccgataaaagcaaaaccctttatttaaagcagaaga

SEQ ID NO: 1112 - DNA, 103 bp, Cronobacter dublinensis
ctgaacggcgctggtcatagcgcgtgcgatcctcgtcgtcatagtcgcggttatcctgcgtgtcgcggccatccgggcggtaagcctcgttaatcgcctgcgt

SEQ ID NO: 1113 - DNA, 156 bp, Cronobacter dublinensis
cacaacgcggagatttcagcgcgcctgcccggaaataaaataccgtaaataactgcctttagtggatctcgtaataacaccctgtcacgcgagctattatttaaaaagattttaaaatgcgagcgctattccagaaatcctgcaaacggcgcatca

SEQ ID NO: 1114 - DNA, 118 bp, Cronobacter dublinensis
agcggcgcagaaatgaaaatgtccgcgtcggtaaaaactaatatgcgtttttttctgtattgcgttctttctgaccaggtatcgtttcccgggtcgttgtccccgtctttcatcgcga

SEQ ID NO: 1115 - DNA, 138 bp, Cronobacter dublinensis
gcgggtcacttctacctgcgtctcgcccggtttggtgccgggaagtaaattgatgctggcgttcgagcctggcgcccgctgtaaattttccagcccttgttcaagaccgcgtaagtccagtacatcgcctttcgtttg

SEQ ID NO: 1116 - DNA, 504 bp, Cronobacter dublinensis
gtacgcgggagagtgaacgcccacaagtattaacaggatcgcgatataaacgcttgaatgacgaacaatcacattaattccttaaccatccctgttcctgatttccggtttatgcgcgcggcgtaaacggcttccatgaccctgtaataaaaacaggcggcagatatatagcggcctttccggcgctacaaaggaaacatgtaaaaaaatgcgaataaccgtgcgaagaaataaaagccgccggagtaaataaaaataacgccggagaaaagatgtcattaaagaggtgtaccaataaacagagaggtataaatgaatccagtaaaaatcacaaaatcaatgcagatgtgcatgatgtgactaaaaaagaatattgccaatatgacactttataaaatgtatttcacgatagttacaaattgacgggtggcagataagaattgacgcaagcgagggcggttaaaagcgagaaaagcgctgcggggcagcgcttttttgaagcgg

SEQ ID NO: 1117 - DNA, 184 bp, Cronobacter dublinensis
tcctgagtgtcgtgagacgaggcgcatcaacaggttatcgaccgcgcctgtcatcattataagaggttaatcaaaggaagtcggcgggacggtgatttatggcggatggcatcaatggcgggtgacggcatcaacgtcgggtggcgcaagagggcgagcaagccaggccaggagggtgaaacta

SEQ ID NO: 1118 - DNA, 122 bp, Cronobacter dublinensis
tcaacgtgttatacgacaaggccggagcggctgcgcatccggcctgttttgcttctacccttcgctcaccgtcgagggcgtcagcccggaaatgagactctccaggtcggcgctctgacctg

SEQ ID NO: 1119 - DNA, 112 bp, Cronobacter dublinensis
ggtgactgtgagcgatatgcgccattattcaatggtgggtgcgcttcgcttacccacctacagtgccacaaagcgacagcgcgccatcgtggaatgcagggcgggtcagcgt

SEQ ID NO: 1120 - DNA, 105 bp, Cronobacter dublinensis
aactcagtaaccgtttgaatttaatgtaaataaagtaatgattaagagtgaagtgattttcaaaaacaaaaaaggcacccgaaggtgtttcaccctgtttcaccc

SEQ ID NO: 1121 - DNA, 117 bp, Cronobacter dublinensis
taggaatagaatagcgagctaaagggtgaaagggatatcgcgcagcgggcgcagggttgcgggttatgtagagggaaaaaggcgggaaaagcgcggctgatgctgttgtctggtatc

SEQ ID NO: 1122 - DNA, 198 bp, Cronobacter dublinensis
tttcgaagcacgcgtgaaggacggtcaggtacaggtgaaggcgtaaccttccgggtttccacgaacacgggtgcgcggcgcttagcgcgccagcattcataaaaaatgttccatcggcgctccgcttaccggggcgcctgttaaggacaacaacaaatacgcgcgcgggacaccgacgcgccaccatcaggcgaactt

SEQ ID NO: 1123 - DNA, 225 bp, Cronobacter dublinensis
aagctggcagcgcgcctgcggcggcgcaaacgggtcgcgcccggccagagccggtaaagacgtcagcaacagcagcgcgaacaacgcgttacttttcatcggcgcgccccagctgtaacgtcaggcgcagcgtctggccgccgtcggcatgcagcgcgaacccgtgtgccagcatgtcggtttgcgcaagccttgcgaatatcgccggtacgtgcgcccagccca

SEQ ID NO: 1124 - DNA, 109 bp, Cronobacter dublinensis
tgcatgctgttgttgcaaggcacgcagcgccgcggactgctgcgcaccatgcctcccgctgacgaaggccgtccacaagcggcgccagaccgccataagccacgctcgc

SEQ ID NO: 1125 - DNA, 141 bp, Cronobacter dublinensis
gctgcgcgccgcgcctgttgcagctgcgccttttgcgcgctaatggcgagggtttgggcctcaagcttgtgctggagcaccagctggtgccttgcgataacgcgatagccgatgcctgccacaagcgctaccgctaacgcg

SEQ ID NO: 1126 - DNA, 119 bp, Cronobacter dublinensis
ggcgttaacgtctcaatcagcgcctcgcgccgttgttcgtcgccctcccccggcgagagcggcagcgcccaccagcgctgctgcttccagccgcctcgctcgtaagtcagcgcgaccgc

SEQ ID NO: 1127 - DNA, 165 bp, Cronobacter dublinensis
cgtctaaataaataacacgagacgcttcaggcaaagcgaaaacagaaccgcaataaattctaactaaatgaatcttaaataataaatttatttaaaaatccgtaccgccggacgacgcctccgcttttttttgcgccagaacaaataaacatcagatattgtctc

SEQ ID NO: 1128 - DNA, 110 bp, Cronobacter dublinensis
ccctctgcgcggccgcctcttttcccacgtaatcccgccatcatcacgacattctctcgctacacttaacaaaagcgtattactatcggttatctcagatgccttcaggg

SEQ ID NO: 1129 - DNA, 187 bp, Cronobacter dublinensis
cgggtttggtctggtgggtgcgctgcgcttacccaccctacacatccttcagagttcgatgacacacacaccacatactacgcttacccaccctacgttttggcaacgattcgcttaccgtagggcgggtaagcctcgcgcacccgccgtgcggccgggtttatcgccccagcgcgcgcgacaaaat

SEQ ID NO: 1130 - DNA, 312 bp, Cronobacter dublinensis
tcaccctaccaggtagggtaggtgttcgtgttttatcagcgggtataatcacgcccgcttttttatgcgctaattctgaaacaagcctcgccttatttccggctattacgccttgatggcgaacagattcaaacgaattaatttcaattgtttcacaattatttttcattgctctgatgtcattgaactttcaatgatttcccgagcaagcgcccgccaacacttaaccgtatgacgaaaaccgccgatataaacaatctttgcaacaacggcttataaagacgtgtgttcacttaattgctattaccggga

SEQ ID NO: 1131 - DNA, 170 bp, Cronobacter dublinensis
tcaggcggacctgagagtcgtgaccatttcgtgcagcgaacatctgctggataagcagagcaagtggtatcacgtccccgcgcgcaaaccggtgtttgtcgtcacggcaggaaaaagaatccataccgcagatttttgtgaggtgcatgagggcatcgagcctgcggacc

SEQ ID NO: 1132 - DNA, 213 bp, Cronobacter dublinensis
acggagggtgaaacgattgatttggtaaataacgtgcggaatagctgggaaatacgcgggctataaaaggggttctggccgattcagaaccaaaggcattatggagaacaatatcgctcagtctactgaatagtcttttttcggaaacaaaaaaggttgatttaggcgcgtatgagcgctaaggctcagacttcgagataattcataataccg

SEQ ID NO: 1133 - DNA, 170 bp, Cronobacter dublinensis
gcgttaaccacaaggggaatgtaagcggtgtaaccgatacggctgcaaaaggatccatttgggatcgtgacgtaccgcggcggatcgcgaaaataaaagggtatatgggaaaggcggttatctggaaagcgaactgaccacagatgcgcaaacgcgcggataaaatcggc

SEQ ID NO: 1134 - DNA, 409 bp, Cronobacter dublinensis
cgctggggttatcatttactttgaccattccaataaagaaggggaagcggccatcgttcaatggggtattttcattgatattaaatcgaacaccctcggacgtatacagaccaacggcgatgccttttgccgcggtgtcgtcagttaaagtattggcaaggacggtgctttcagtgctgtctgctacaccagtaaaccggagcgccgtatgggcataatagttatcggtattggtataatctttgcagcctgcgccagtgacggaggcaaccaccaggacggaggacgtcgtgttgactggactggtggcaaccgaaggtaatagctccattttctggctcccgagatcggccgtagtgcgactcagggaaactgaacaactttctgcctgatgcacactgccagcgat

SEQ ID NO: 1135 - DNA, 220 bp, Cronobacter dublinensis
ggagcacgtccggtatgagccgctattgtgatgagcggagcgcctgaggttattcttttgatgcggacggaaggtcaatgccagaaaaataagaaagtaacatggcaggaatacacttttgacggtgaaactgcggctatattgtcgccggcgcgttatcagagcgaagggattatcgtcatcaggtaagagaaacatacgcagcgacggagtgggcaaa

SEQ ID NO: 1136 - DNA, 102 bp, Cronobacter dublinensis
gccggtgcgttttccgtgtttttcccgaagaacgcgacctgattgacgcctcgataaagcgctgaggcattctggcgaccctcgaacatcgccacgccgcgt

SEQ ID NO: 1137 - DNA, 188 bp, Cronobacter dublinensis
ttcagcgtgaggcgcgtcgaagaaccttgtcgatgcgatcccgtccaggccaccggcgatcgatgatgatcctttacaaaaatatacgtgtgctcagaacaatctgaatatcagtcagttagcacgctatttttcaccaacgagccggtaaatgcgcggctggcaatcgagcgggcgcaacattctta

SEQ ID NO: 1138 - DNA, 276 bp, Cronobacter dublinensis
cgaaaggcgggtttttttaacagagacggcgttcagcgcttatgaaagcgtaaagcgcccatccagaatcatgctgtacagcgcaggctctccattatccgtcagccgataattttccttatgggagagcttatagatcccgacaggatcctgccgtaatgtggccagcgccgtttgcgtcggcgcggcattaataaactggcggataagaaaacgatggtttcccgtcacgggttgcctgttcatcatctcgcgaaacgccggtaccttttcgcg

SEQ ID NO: 1139 - DNA, 122 bp, Cronobacter dublinensis
tttcgctccgccgtgtgagtaaaccaccgcgcgtgcaggatcgcgtaccaacgcgtgatctgaaaaatagagcacggatgaacgactatcatccagcgcatgaaagacctggcccatcacgc

SEQ ID NO: 1140 - DNA, 104 bp, Cronobacter dublinensis
cgcaggcgcgacggcatgacgaaacagcaatagctggtttttccgggcgtccagctccggcgtggtatcgcggtcataaccgtagatacccatgtttttttccc

SEQ ID NO: 1141 - DNA, 119 bp, Cronobacter dublinensis
caatcgcggttttcagcgcctgcgcgtcacgctggcccaccagtaatccggtctggttatcgataacaccccttgcggcacgccttccatatcgtgcgacgggctcagggcgatatcaa

SEQ ID NO: 1142 - DNA, 137 bp, Cronobacter dublinensis
aacgcagacggcgtggcgccgtttgcgcggttatcaccagggcaacattcagagcctttcggaacgtatgacttatcttccggatgcgataaaacaggccatactctgatctcgcctgcgttgtatcctgacgctac

SEQ ID NO: 1143 - DNA, 145 bp, Cronobacter dublinensis
cttaacgcctgttactgtcctgccgggccttatgccagcgcgatatttttgagccgtcagcccgttttatcgccttcccttcaccttaaaaaaactaatccgaatcctttcactttagaaaaactcaatcgtgatgctttgcaca

SEQ ID NO: 1144 - DNA, 129 bp, Cronobacter dublinensis
gcgccccgacctccttttgcgcctgcacaggcgtccagtcagggcagacagcgcgagcgctgccacacgccaggctcgcccagaataagataataatgatacgcacgtttacccccttcgcttacttgc

SEQ ID NO: 1145 - DNA, 251 bp, Cronobacter dublinensis
atacccaccggggcaatgacatgggcgctccgcttacctgccctacaaaatcaccgcttcaaacccgtagggtgggtaagcacagcgcacccaccggggcaacggcctgtggcgctttgcttacctgccctgcaaaatcgccacctcaacccgtagggtgggtaagcacagcgcacccatcggggcaacggtatgtggcgcttcgcttacctgccctacaaaaccatgttaaaacacgctggattcccgca

SEQ ID NO: 1146 - DNA, 170 bp, Cronobacter dublinensis
tcagggaggctactaataaaaagattaaatttatattccctagcgcgtggcgagcataaaaagggtcgccacagcgcggccttttttgtttttctccccggcctccgtcttcttctcgctttttttacgcctggctgtacggaaatggttgatatatgcccgttttcgct

SEQ ID NO: 1147 - DNA, 106 bp, Cronobacter dublinensis
tatgccgaatgggtgcagaagatcttttaacaaaaaattttgtagggcgggtaagcgaagcgcacccgccatcaacacgcaacacatccacgcccccgccatcaac

SEQ ID NO: 1148 - DNA, 215 bp, Cronobacter dublinensis
ctttaacgagccggacttaaatgcgctgggcatttatccccacgaattacggggcgagagctttgcgcaaattaagccggatgtcgatgcgcttattcgccagtatggatttgtgcttatttccggctcggtcttttatttcccgcactgtccggaataccggcagaaacatttgcatcatctggtggtgctgaacggcgtggatgaggcgcgtg

SEQ ID NO: 1149 - DNA, 396 bp, Cronobacter dublinensis
ttaccatagtaaagaactggccgatgttattaaaaaatacaaaggcaaagcggatgaataaggcttaattaaaatgtgtgaaaaataaatataattgcaataatttaatttattgggattatttgaatacaaaaaaatcatcttgtgcaccaattttattggtcgggatatttaatatcagttttattcgcttgagaccggtatacataatgttcgctgatcgcccatagcccggaaatcaaaacgctgtatcagcaattcgcgcgacagaaggcgcagtgagtgacggcgggtgcgcgttgcttacccgccctgtgagcagcgggcagaggatagttcacccgccctgcgagcgacgggcgtgagaatagcttatccgcccgacattctttcata

SEQ ID NO: 1150 - DNA, 167 bp, Cronobacter dublinensis
aatgttgagctcaaagattttaataatagcgaaatcataaatatcaaagaaggtcgcaaactgacgatctctggtggaggtgagttaaataacattaccgggagccagacaacgaccattgcgaaaggtgaccaaaacactacgatcaaggatggaaagcaagaaac

SEQ ID NO: 1151 - DNA, 316 bp, Cronobacter dublinensis
aaaaccggtgaggctttgattacatcgcctaataggatcactattaaaagtgaaacagaagttaatgtagatactccctgggctattgagtggaaaggtatccaagttggatttaccgctgcttcagtatccactactggcgcttcagtttctaatacaggtgtaaacgttggcataacaggaacaaaaattgagaataatccaataagtgtgtattataataatggatttaagctaagagtaggctcgattgagtgtgatagtctaactgtggcattaagaaacgcccgcctccacatgtttaattaggataata

SEQ ID NO: 1152 - DNA, 355 bp, Cronobacter dublinensis
agctggatcgatccgttaggtcttaatcagttaggtattaaatgtataacaaacaaggtagatggtgatgcccgagaagcaagacttttaaaacgattacagaatatgtttggggcagaaaatgttctgagtcagcggcatttacgcaatgctcaagggaaaatcgttggtcttgttgatgatgctattgtgttaggaaaaacaaaaggctcccgaattcttgattttgtagttaagacaaaggatggctggaaaggaattgaggtcacgagtaaaacagcttcgaaagtatctcaatctgcaaaagaagaggtaattcgagctgccggaggtggcttcgttcgtcatccagtga

SEQ ID NO: 1153 - DNA, 512 bp, Cronobacter dublinensis
accctaagtgtcgtaaaacaaataaacagtatgacaaagcaagtgacttacctgtagtaaaacccaatacaaaagaatgggaagaggctgttgcagcgttaagaaaagatggtaggggagatattcgcgtaaaaaatgctgctgacgcgaagaaattactgaaagaagcacgtgggaacatggatgcaaggaaaatgtattcgtacaagaaaaagaaatatagtaagggatacgaatttcataaacctcagcatggttcaaaacctggtgggtgggaaaaaggtgaggtaagtgttggtaatgatcttccacatataaaatggagagatggagctaatgatcaagggcatatattctttgaggactaattaatggacaacatgattgcatatcctggtactcttatggatgacgacagtggaatgcgagtcgttaaatgctacatatataaatttgccaaggagagaattgacagaaagccaagatatgatgccaaatccaaaagaatgaca

SEQ ID NO: 1154 - DNA, 337 bp, Cronobacter dublinensis
tgaaaataggcttgcagtcaaggattttattcgattgcatcaagagttgggaaataaaagggtgtattttatgcctcaatattttccagagaatattcagtttcacaaaagaaagacgttggtttattgctcctcaatggaagatgttgtcaattatttgaatgcgtggggcgagagtgatttgcagaatattacaattatagattctgagtttcgttggttttacgatgttttcgaggatgaagttaaagatgcagaagataatatggatgtggttgcatactattattgcaaatagcttattcgtttagatgaagtaaatataaccttcgcctag

SEQ ID NO: 1155 - DNA, 123 bp, Cronobacter dublinensis
ccgcgcctgcccgccacggcgcagacggtgccggttcggcgtccggcatgcgcatcaccccctcaacacccatcgccgcaaacgtatccatctcaccgcgccaaaatgcgcatcgccatacaa

SEQ ID NO: 1156 - DNA, 387 bp, Cronobacter dublinensis
aagatgtaattaaaaagggcttttaaattatctgggtgggctatgcctcccgccaatttattagagatatataacaactttaatgtgctttattatcaggcgacctagaagagtgttatgaggtataaatgccaaaattgatgtgagtattaattttttgcgaatgtttatacgactatgatgttaagcaatacaaaaagatctgcactatacccaatctttcaccttcattaaggaaatcgaagcggtctcttgatttgccaagtcagataaaaacggccattctatttcctaaaaagcataaccataaaacgctttttgtcatttaatgacaccaaaaataatattatgggtttaataaagattagctttaatgacaggggctat

SEQ ID NO: 1157 - DNA, 896 bp, Cronobacter dublinensis
agatggctttattcaaagccatcatcctattcaggatgcatgggcgcaaaagtggattgagggctataaacgtaatgatgcccctgctgtattattgcagtcatcttcaggtgcgcctcatgccgctattagtgcagcgcagcgctcaagaagagctaaacctggcggatggaatacaactttacgagacgaatttaataaaggcttcgaagagatgattaaagccggagttcctgttggtcaggcgaaaaaggcgtttaaagatgcgtattcatatttcgatacattaagagaagcaaataataaaaacccttactttgacatttaatgattcttaaggaattgtatgaataaacacattgaaaaaattgaaactgatagaaaaatcaagtttcctccgttatacaagcaattcttggcaaatgaaataaaagatagtgatgcctgtgaaataaatagcaaggatgatgggactatatatttgtatagctatatagaccttgtgaaaaggaatgaaacctatgatatccaaagcgttgagcctttttattttttgattgggcaggatggaaatttaggttactttatctatgtcgaaagtggtaaggaaagcgatgtaatatttagcgtggacctgggggcgttgggtagtttggaaatgaatgaagaggctaaggacatatattctttaagtgcctaaactatttgttaaaagccgagattcttttaatctcggctctgtattaataaacctggcaagctataacgtggttggctattaagtttgatttcatgggtttattttttaatatcgaaagtaatttaaggtatttttttgggctagaagtcagaaccgccatctctgttgtacattagagcatctacctgaagatatg

SEQ ID NO: 1158 - DNA, 726 bp, Cronobacter dublinensis
gctattatcacataacgccatcccagaaataaaagataaagcaatgcaagttataaagtctcacagtttcgttagttagagggttgtttttaattaattaaatcataaagttaccccttctggttgttatgtaaaaaggaagtgggttattaatctagccatatcatatgctatttccctatactaaatgtactctcaacaaaagccattgtttgacggtaaaaacttttaataaaagagattggcgttgaataataaatatatgttagaaccactttttttattctcagatcaattatttaaaggggtggataagaaagctgcgagtgattttttacttgttaattgcaaagaagatgcgttcatttttgcttttgagcagaaccttccatccagttataaaatttagcaagatgttgtgtccgaatatgaacaaaaattacgtctgaatggctcatttgcagctgcacaactttttgtttccaatgaattagaacagcgtcagaagcaaaattcttccttagtcttagaatacagaaaaatatagttatttttaactctgctattcttaaataaatattttaaaattgtcttttcagctatgatccgataggagaaaatatcgctaattttatcggaggttactccagtcgttgatagtatacttaagcgatcttttttggataaacgcgttatagcagcaggttttttttaaatatgaccctc

SEQ ID NO: 1159 - DNA, 128 bp, Cronobacter dublinensis
ggcacgtaaataatagggcgtggataacggcgggtgaataagtggggcgtggataacggcgggtgccccatcactcgccatcccaatcactcagcccccacgcgcccgcttaatcgaggtaaaacacc

SEQ ID NO: 1160 - DNA, 126 bp, Cronobacter dublinensis
ccagcataacggtcatgtgaattctccttgttttgcggtgacggggggtgcgctacgcttacccgccctacgtgctggaaataccgatgtagggtgggtaagcaacccaatttggaccaaaaaaaa

SEQ ID NO: 1161 - DNA, 100 bp, Cronobacter dublinensis
cgcatggtgggtcgtgacgtggtgggtagtgacacaacacacacacacacaaagcactatgacggcgttgatgtggtgggtgcgcggcttacgcagccca

SEQ ID NO: 1162 - DNA, 129 bp, Cronobacter dublinensis
ttacccaccttacaaaagcactatgacggcgttgatgtggtgggtgcgcggcttacgcagcccacttgagaaaaaaccatcttatgcgtggtagggcgggtaagctgcgcgcacccgccatcaaccatt

SEQ ID NO: 1163 - DNA, 100 bp, Cronobacter dublinensis
accagtttgtgaggagattggtagggccaatatgcaactttcagagaacgctaaatttcgtggaaggcgtctcgcaatacgcttaaataaaccggttcac

SEQ ID NO: 1164 - DNA, 194 bp, Cronobacter dublinensis
cgtttgacgttaaagcgattgttacaaaacatatatttcagcgtgatataaacctgtacaacacaaatggtgtatgtacaacttcttttcccttaagcgaaatcagagcgcattttcgcttccttccgggatgtttaagctcgccactgctatttccgactgtgagcacgcctttaattacgttttaattttgg

SEQ ID NO: 1165 - DNA, 118 bp, Cronobacter dublinensis
cggagagtgttttgcgcgcgatattcagggtgccattcacgcagggcgatttgtgccgtcaacgccgccatcggctgattattttaacgaaatgaaacgccgctattttcggtggacg

SEQ ID NO: 1166 - DNA, 111 bp, Cronobacter dublinensis
cactttcgaaggagaactcactgcgacctcatgcgatgtaaaagtagacggtcagggcgctgacgcaaccattaaattacccacgctcggtatttctcagctcgatactgc

SEQ ID NO: 1167 - DNA, 336 bp, Cronobacter dublinensis
cttcggcgaggttttttgttttctgccgttcttcatttcaccttactcaccgtttttctgtcactcgcgtagttaaatacccccttgttttctggatgcttctggctgcggtgacatcatttatgctctcgtatcagggtgctcatcctttattcataagccaaaatcccggtgacggcttttggcgacaaatgcattaacggttgtcgttatacagagacatataactacctaattattatggtaaaaatagatggggtgttaatggtgtcgctaaatggtgacaacagacagcagcattttccgccaggaaaacgcgttagcgctcacgaacgc

SEQ ID NO: 1168 - DNA, 324 bp, Cronobacter dublinensis
gactgtagctgtcggaacagcggcgcatcaaattgccagcgcagcgcagtcagcaggtgataaaggtggcgagcgtgcggtagccgcaagggcgttgcagccagacctttgccagcaacatcagcagcagggagagggtataaaacggaacgggaatggcgggcatcaggcacctgcggtgacgacagcaatcaacgaatgtcatgttgtgccataaaacgccggggaaaacacctcacccattttagtcacaaaagaaaacgcccggcgaaccgggcgtctcttagcgcgtatctgacagaacggcatagacattaattgcgc

SEQ ID NO: 1169 - DNA, 200 bp, Cronobacter dublinensis
ccgcgtcattcagggctaatgtgaagagattatggagaataagacttgtctgtatcgaaccggtagcaacgagcccggaataatactctaatgccggtaatgggttgcgtaatttttaatataacgccatgcgaggaataagataagcggaataaaacgtcgggtttcataaagcgccgacggatcaccacgaaaaagac

SEQ ID NO: 1170 - DNA, 123 bp, Cronobacter dublinensis
gcaagaaatgtattttgctgctgcatctaattaattaaatcattctttgaatctatatataaaaatcacaggtcttaatacagaagctgtgataaaaacgccgggaagaatttaatggatatc

SEQ ID NO: 1171 - DNA, 153 bp, Cronobacter dublinensis
ggttttgcagttaatatgatgaataatcaacgagttgtcgaaatttgataatttgtgcggtttttaagccgaacggcgggtgtcagcgttaaaaccaggcggattacgctgtatgcgtcattaaaagaagaggaaatgcggagtaaaacgcgc

SEQ ID NO: 1172 - DNA, 228 bp, Cronobacter dublinensis
tgtcgcgcgcgtcgcaggcggtctgatatcgtgttgcaccacgatggggcagacgcgcgtggttatcgtgcgcggccatgagcggatatttcacccgatgtgtttctgtatataattcctggaaaatatctctctcaggagctgtttcgccatttactgatttatcgccaggacgtgtttcaggaccttcattaggctgtagcttttcccgaggctccggcgataagg

SEQ ID NO: 1173 - DNA, 303 bp, Cronobacter dublinensis
ctcgggtctatcgcttcggcggcgaagagtttatcgcgctgctggagacggtcgggcgtgcgcttttgcgacagcctgcgccagcagccgttgaccgtgaatggcgacacgctacgcgtcaccgcgaccggcgggctcacctgcgtattgccagaggagacgttgcacgaggcgatcggccgtgccgataaggccatgtatttcgggaaaaacagcggccgtaaccgctgcatcctggcgcataacgatatcgcgcttgagacactggaataataaaaagccgaactactcacctggaggtat

SEQ ID NO: 1174 - DNA, 227 bp, Cronobacter dublinensis
attcggttaataaatgaacttcattttaatgtaatgataaataacgttttttattttgatggaatatggttatgcaattgccgtggagatttatttggcggcagagaaaataagataaataattatgacgccgccgcgcctgttttttgtgaaagcaaaacgtgaccgcatcgccttttttcctgaaaaaaccgttaaaacagaggcttgcaacgatcccgcacgtc

SEQ ID NO: 1175 - DNA, 291 bp, Cronobacter dublinensis
ctatctgagcggcacggaaccggaggagttcgcgaagaaactggctgcctgcggtgatgatggtagttgccgagctaacgtcatgaaggagatggcggagacgtcgaacaagaatatagacgggtttagggattgcctgaaatcaggggacaaggcgtgcatcaatgacaagctgagcgggatagagaatgcaaaaggttatgatgcgctgacagcacagataggtgcagatgtggccaatacctacaaggaagggttaggcgtagagacattcaacaacgcgctggacta

SEQ ID NO: 1176 - DNA, 142 bp, Cronobacter dublinensis
acttttttcccaaaaaaaaaatttttatgggtgatgaatttcttgagaatgcgctgggctggctttttatacgataaagatggtttcatttcacactattgttaccaatggaaaaagttatgttcctgatgaaataaggggt

SEQ ID NO: 1177 - DNA, 196 bp, Cronobacter dublinensis
tggcttttactggctttcttgattctattagagataagccagaaatagaccaaagctttttaggtgacagaatatacttttcttttttaaaagctgggttttttatgttaatagaagaagatagagtgacgcaaatcacattttacattgaagaaaaggatggctttcccaaatgtttccttgagttacctacttt

SEQ ID NO: 1178 - DNA, 272 bp, Cronobacter dublinensis
gagccgctggtacaggaacaggcgttcggcgattacgaaggcctgtcgaggccaccgcgtctggtgtcttttatccaaaatactgatttatcttttttcaacttccaacgggaaaatgaaatgtatacggaaaattgagctttgaatcagccagcgaacacattattacccaaccaactgagagattacgcatcataaggacgtatcactattgtaaacattgatactgataaaggtgaccattttatcgtggttgactcaaagaaataggt

SEQ ID NO: 1179 - DNA, 295 bp, Cronobacter dublinensis
tgctaatgataatgaggtatatctagatggatatcttatttatcattcaaatgaagcggaagcgccggagatgcaaaagacgcacttggtaattcgggggttggctatttcaataaagaaatttagaattcaatgccgcctgtgaatttatccaaaggaactaatggaagcaacaaaatttttggggtaaatgataatgttgaattgaaaaaattcttccccgtgaaagataggggaagagtacgtagtaaaactgtctatatcgttagggattgggggcggattcttccccagc

SEQ ID NO: 1180 - DNA, 1102 bp, Cronobacter dublinensis
tttagcaattagctttcgtgaaaggatatgaaagtatctaatatctttccaagcatctgtttttgggttacctgcctcgtgcacggccggatttaacgtagttccatatcatgatcaaagcttttttcgagcgtatatggaataacctataatgaaaccatagctcataactgatgtggtcgacacaccgcacgaataattgatagtcggggtagcgttcataacagtagggctgacgcgatgcgctaagtcagctgagagggctgagatttcttaacagatgataaaggaaggtgattataatcatgccgagtaacttaaaatcaggcacgctttggtccttttaagtcagagcttacattgtaggaagaaagaaatgatattcggaaagccttatgaatttgctgttttttatgaagtgttagaaaaaacacaagatgaatactggaaatttggtgtgtttcttttctttattgaagatgaaatatatccagcgaaaggatctaattataccttaccaatgaatataagctatctgaaagaaagctatagggaagtaatggagtgcgctgtaaatgaagatttagatatttcaactgacgctcatgttttattagaaatgttagctcattctcacggattagtgcttgatagcgatcctgaagattttgaacttcctcctttgaataatattggagtgtttttaagtcctatggaagtggttgataccgggttttatttgttttatcttgcagtgagtaacgagcaggaatgtcttatctatagtgctgattatggtaaaacagcccagaaaatattcttgaatactggggttgttgctagtgttttgggagagttgccaaataaagaggcaatttagaggtttgtttttaatattgaattgctttattttgaggcgtcctgtgataaataaaatagttctgtaaaacaacgaactacactacaagccggtgctcatcaaattgtaaataaaatgggcgaagcgtatctgaaaagcctgctcgaaaattatgatgtttgcacagagtaaacatgtacttattctttacattgtgcgttgcaccaatacccaacataggta

SEQ ID NO: 1181 - DNA, 164 bp, Cronobacter dublinensis
tcgtccctgttatagcgcagaaacgccgggcgggcgacccgcggttctggtagggccgtgcggtcgtgtacggcacggcgcatcgccacgcctgaccgcagaccgcgattttctggtcgaatcttccacgcgtgaggttttatgcagttttatcggttatgccg

SEQ ID NO: 1182 - DNA, 954 bp, Cronobacter dublinensis
atttttatgaaatgcaaaatatatttatcagtcattatgctttttttactttattgtggctctgccagggctttgattgagacgactacctctattcaggacgaggcgtgcattaaaattaaagaagataaatacactggcgttgcagagtttagatgtgcgggcgtcagcgattatagcttgcgtgttttatatgacgataacaggatgtcgttagatgtggttacgccaggcaatttaagacacccacttgaactatgggataaagttacccgctctttttattatattgaaaatgatatcgaatggcgcttaaagagcaacgggggaaagaaagttcctgtatcgatgatagtagcggtcagaagtaataacgttgataacgcccctgaacgctggatggtcacggtaggactgggcaaggatttaaattgtattacgggaatatacgactcaagtttattcagcgtgaaacaagtaaggcatttttctgatgatatattcaatcagcactgtctggctttttaagtaatatttgtcatgcgaaagaggatgttgaaatgggaagtccagcaccttcggtaagaaaagcattacaggacgcgacaacgagatggcctaatcgaagcaagctttccgatggtattatgggggatgcgtctcatcagaaaagaaaaagcgatcataatgagggtaatgcatttgatataacgcacgatccagttaatgggcctgattgtaatgaatggtcgcaaattgtaatagatgatccccgagtcaaatacgttatctggaacagacgtatttatattgtctcggaagggatgtggaaacaatattccggcaccagccctcatgataaacatatgcatgtttcaatttatgagaaaagccgcaatgacttatcaccgtggccctggctaactcacgataattatcagagaagcactgaag

SEQ ID NO: 1183 - DNA, 1540 bp, Cronobacter dublinensis
gcagcactaccccgtttctggcgtccggacagctgctggaaaccgggggcagcctgcccgatgcaatgaaagaaggcatcgtcattacccgcgtttgcagtcggggctcgcgtaagagcagctttcttttgacgtttgaggggatcccgtaccgtgaaacggtctgttatcgcccgccgctgataaagtgcccggtaattattaaaatcccttcacgcactcaaaaattgaagagattttagcgtccacatccattattccaaaggatttttaaatatgataatcagactcattgtagttgttcttttgagtggtttcccagcttattgtatggctgatggtgtggttaaatatggatatgatagggatagtggtcaaatttatgttaaggataaagaaaagaaaaaaactttgaaatttgacgaggattacactggtaatccgtcatatttatttggttatttttcaagcgctcctgcaattatatctgatgggcgttcgttacatgatttcactgtctatgcaaccttgaagtacagtaacaatgaatttgtaattgattgtctttatgcaaatgtaaaaagcaaactaaatggcatattagtcaaagaaggggtatgtgatcttggtatttcacaaccagatcaatactccagcctaataaatgaaaaagttaatagcatcgaaggcgatatggacactatagatactagtcttatcttgcaagggaataagagttttttgcctgttataatatataacagtgaatctaaattaatgtataaactttatgaaagcaaagacgcattattaaatgatgattattcaatcattactctgaatagtgatggaacatgtgatgcttatcaagatagtccatggttgatttattatggcagtgacgtgaaacataatgaaataatgaatgaggataatatgggtggtgtattgaaattgaaaaagatgatgccaaatgagctggggtcaaaaaaatgctccgattttccattaacaagtgtaaaagagccgaggtcttatttttatgactcactatataaagtgaagaaatcttatttaatcaaaggggataaggtcaacttattaaaaattagcgatgatggtaaatggtgcaaaattaagtattttagtgaaagaaataaatttacttgcggcacattacagtgtgcagatttgaatttttaggttttaaaaatctgaaaaaggatgaatgcactgttgctcccggattggatattttatgccacaaatcaataccaaatccttcagctgcttttggccctgactagcatggaatgacttctcccgcacgaagccgcagcatcggttgaagatgcgacgaaaacgcggtggtacgacgtgaccgggggcggccaacttccccaaactaacataaaagaaactcatcagcacccgtcaccaaaacgctatcaaccccgttaatgaataacacagccttcaggaaacacccaggctcgctaaataccagaaacccaccctcccaaaaagctaaaaaccttaa

SEQ ID NO: 1184 - DNA, 732 bp, Cronobacter dublinensis
ggtggcgccgttcgcgctgaccgaagacgcgccggttgtcgcgcgtgcgccccggcgacacagcggacgtcgcctctactggctgggctggggagcgggcgtcgtggcgctgatagcgctgtggtttacgctcagcgccacgctggcgcatcaggtcgcgcaagtgacagggcagggatgacgaatgcgtgaactcaacagcgcgcttctgaccatgctggccgcggtactggcattgtggctggtactggggttctggcccgtttccgccgggagccgcgtcgcgctcgccgtctgcatcctgttaatgtgcgccgccgtgctctggcggcagcggcggggttatctgcgccgccaggcgctcagcacatcgaaaacgcaggagggcctgccgccggaagatttccaggggcccgtggtgctggtttgcggcgatacggcctcgctgtttacgcctgatgcacgctggcgtgaaacccaccagggatggtatctgaacgtcccggatgccggacaactgccggtactggcgcagcgtctcgccgccgggcgtccggcgctggtgtcgcagatttcggtactgctggctgtggtggcggaacaacataccgatgaagaatgctttacccggtcactgcgggaatggcgcagaagtattacgcagtgccgcacctggcttaacggtttgccgccggtctggagtgtcgcctgggtcaacgcgccgcaggagca

SEQ ID NO: 1185 - DNA, 1896 bp, Cronobacter dublinensis
aggtgactttacaaatgcaagcaatgtcgctgtacgactatgaatgttaaaaagtcattatcttttaatagttctgactggagagggtatggcattcacagtgaatgaaaatggatgttatcataaacgttataataaatatgatggcgcgcattctttatatggcactgatcaagccgaggaggactgtgcatattattattcggacacaaagaatgaagttgaaaagataaagaggaaaattttatttaatatttctataaataaagtatcaaatgacctgtacgctttggtgcacattatcaataaaagtgaagtctctttatatgtctggaaaggcgattttttcccattaaaaaaacaactctctggtgatttctttaatctaatctctgaaaaagttagaatggactatcttggtgcaaaagttaactttggtgcttccccagattcatattccgattttattgaaatagtgccaggtggcgaaatgaaagagagggttaagctaaacgaatattatcagttcttaccgggccaacacagctacaatgtcggaacgataagcatcccatttattcgaaaactgcgcacaggagaggagtatgcaacgccggagaatgctttttgggttagaagtaatagaattatcattaccgtcgatgggaatggtattaaagatactatcgctcagttttatacggtagagtgatgttatctgtgaaaaatattctctggtttattttgtttgtggtaaatattttgtgcgttagtgaggcttatagtaaagaatgtaaactctatcatttggctgaatacaacaaaaaagaaggtgtttattttttaaaggataagtatgatgaaggtcaattttgtatatatgaagaatcagaggctgccaatgcatctttgaaaactgctaaaaatatttattttgatattgcaattaccacatcaaagggaaaggttttttcagaaataaaaataaaaaattctgatataaaaactgtatacatatggcgaggggatttgtattcattcgggaatcaactatcaggagattttttttaatattgtaacagatgctataagagtaaagtacctcgggccaaaagttaattttggcgctggccctgaactggcttctgattatatagccattgctccgggtgaggaaatttttgagcgtataacactaaattcatattaccagttcatgccgggggaacatttgtatgatattggcactgtttatatggcatgtacttatacccctgggacaggagatgaatacctaactacagacacggcgttttggataagaagcaacaggagtaaaatactaatcaatggagatagtctggatgatgaaccgatgcaactttatactgttaaataattcttgaacgttaaggcattgcatcctttatctcaccatagctattgttaattggaaaatatattcattgttccgtccactggcacccggttgcttttaagacggtctggctcgatggcaaaacgattaaaacatttatggcgcagtaaacgcggttgagttattcggttttctcaaccgtccctgcaccgggtggcaccgtgctgtatggaatatgaaaggagaaaaagcatgaaattagctattatgttaattctgtcatcagtttctcttgctggttgcagcaagtctgctaatgaacgtgaaattaaagctccttttgatgagtggtattttacgtttgcaacccccaaagcgctgccagcccaggtcacccttgttaaaataattgatgtcaatgggtacggtaaagtgttccgcaccatagaccagccccaggggcaaagcgtgggccgctgggaccagcacgccggcaaaggcagatctccttttaataa

SEQ ID NO: 1186 - DNA, 1025 bp, Cronobacter dublinensis
ttacggaaactggtgagacatgcgaaataggcggtataattttatattataaatattaatgatttaaaaaaccaggccctgaagttcatcgatatatacattgctctatagggtgaaatatccagttatgcctttgagaaaatttttaactaattgccgggaatgcgcgaatgaattgttttgatgaatatcaatgcaatgatttatcaacatctgacaaggtcaaaagaaactttcaaatgatcgttttggcgacctcgtaaaagacgaggagagcaatgtcttttatgaatttttttacagtgatacttttgctagcaactatgagcaaaggagtgggcgttgtatgtgccgaagaatttaaggcatgttataacgcttgttataataaatcaatgggtatatacccgctgtttaaaaaatatggaatcaagaacgactgcttatataaaacatcggactccgaaaacgagttattaaaaataaaaaaacaactttacttcaatgtcaacgtaagggttttaaatggggatacatatgcttttgtcaaaattaaaaatggaggagttaagagtgtttatatttggagaggaagcttaggctcgtatggggatgaactttcaaaagatttttttaatatcattaataatgaaaccaggatggattatcaaggtgtttcggtgaactttggaagtcatccatatacaattgatgattatatcctgatagtgccgcaggggcaaattaataacaaaataaagctcaatgcatattatgattttatgcctggaaaaaataaatatataattggcacacgcagcattcctgtgctctacgaaccagtgatagggagaggatatgctaaagaagctttctgggtaagaagtaataatgaagagttttcactgggcgcatactaatcaggtttaaaagaagaaaaatctatggtctcaaggattaaactgataatggttataacttgataaaccatttatagcgcagtaaacgcagttgggttattcggt

SEQ ID NO: 1187 - DNA, 172 bp, Cronobacter dublinensis
aagaatatgggccgtggttgggaattaacacgccgaaagaacaattttttgccggtgttttaatagcgttacttgttgttttgctgcgatttctgcccacgatttaccgtagcgttcaggcgcgtatttttcgccgtgaggcgcagaaaacgaatattttacctgccgatga

SEQ ID NO: 1188 - DNA, 148 bp, Cronobacter dublinensis
acgccgcagcgttacatctgcaaaaacacctcagcgcattcacccagttgccgcctgacagcccgctgcgcgaggagatggcgaagccagcctatgactggctgaaactctgtctgatgctcgcccgccccgagaaaatggacgccgc

SEQ ID NO: 1189 - DNA, 109 bp, Cronobacter dublinensis
cgattcgctggtgaaatctgcaaaaaacctgtttgcacaggataaaccgccggcccgctggacgccacgtttggcccggtgctggcgttgcttgaggataaagcggcgg

SEQ ID NO: 1190 - DNA, 116 bp, Cronobacter dublinensis
cagctgttcaccgtgagcgcccctgacacgaccgataccgggcgcgaagatgacggcgatgttatgcccgccgctgattagccctgcgctgaaacccctttcttcacatacttaac

SEQ ID NO: 1191 - DNA, 120 bp, Cronobacter dublinensis
ttcttaccccgccacctttcaggcgggtggggtggataagacctcgcaatatctgctcgggctggtggggctcggtattaaaggatgcgcgaccacggtcggtacgccgctgtcacggtg

SEQ ID NO: 1192 - DNA, 107 bp, Cronobacter dublinensis
gagtgcgggcgctgagatctgcgctgcctggttcgtgtaatctttcttatgttaaataacggaggcgaacggacactacgttcccccgcacctttgcctttcggggc

SEQ ID NO: 1193 - DNA, 229 bp, Cronobacter dublinensis
ggtgcgcgacgcgatgggccacgcgagcgtcaccaccacgcaaaaattacgcggccagcaaaattcggctttgagtgttcagatgccctaagatttatcctggttttgttcgataaagtgttatgctcgacggggtaaatttacccacataaacaccagggacaggtatggtttcagcactcacatggatcgaccgcgacgcgcaggcgcgtgagcgcaccctccgcat

SEQ ID NO: 1194 - DNA, 387 bp, Cronobacter dublinensis
aaaaaaatggggcgggctcgcctgcgacgcggcttctcgccggtagcgttcatgccgcgctgtacgggctgttagccgcgcaaatcgtcctcggctttctgttccgctgggcccagcacgagccctttacctttttcgggctggtggatctctccggctgggtcgaggtaagccctgcgctgcggcatgactttggcgagtggcataacgcggtcgcctgggccattatcgcgctggttttcgtccatgcgcttgccgccctcgtgcatcattacctgctgaaagacgataccttacggcgtatgatgccgggccgcgccaccaccagcgggcagagaaaatgattgtttgcgccgaggaaagaaaaaatcaccaccagtgacgtac

SEQ ID NO: 1195 - DNA, 202 bp, Cronobacter dublinensis
acctgcccggtacccgtatcgacagctggctgttcgctatcctgcactccctgtgggtgtcggatctgcgcgcgcgccgtgtgcgtcagggacaggggtttatcgacagcgatgaacttaccgcgcccgatacgcagtctcaggatgagacgcgcctgcactttcagaaagtgatgcgccacgtcagcgcgctgccggaggc

SEQ ID NO: 1196 - DNA, 443 bp, Cronobacter dublinensis
taccgtgctgagccggctggcgacggcgcgtgccagcctgtcccgaatgctggccgcgcccgctgtcgcgcaggagaaacgcgtgtgaaatccgcaacttttaccccgccctggagcgatgaggcgattgtcgcctggctcgacggcgaaatgaacgacgccgacgcgcagcgctttcaggcgcagatggccgaggacgccgcgcttgccgggcgcgtcgcggaactgtcggtcaacaccgacgccatccgccaggcgttcgcgccgctgctggatgacgcgccgcactcacgcatgcagcaacgtctggaggcggtgaccgccccaacgccccggcaaccacgcgcttcgggcgtcagccgtcgcgcgctgattgccgcctcggtgggatttctgacgctcggtgccgggttcggctactggctcggccctgccgcgacgct

SEQ ID NO: 1197 - DNA, 145 bp, Cronobacter dublinensis
cgctgcatcgttatgcgcgcgtgaactttccaggaaagccggtaaccgggcctgaatcagctgaatcaccgatgcggcgttttcagagatccgacggtcttcgtcattagtaatttcgttttgcagatagtattggttctgcgta

SEQ ID NO: 1198 - DNA, 275 bp, Cronobacter dublinensis
catcccgtaaccgaatcaagcctgcgcttaacgcaaaccagcacaacgggtatcggcagcttcctgatcaaaggttaggtcgcacaacacagtttttcgtagggtgctgattccaaaaacattaaagatatttatgtaaaaacctaccctttgtgtgcaaatgaataagagccataacggtgtaaaccgcatctctctgaagtggcgctaccgccgcgccgggaaacggtgccgctcaggcaaaaagcgccgggcgcgtccggaaatcactgctc

SEQ ID NO: 1199 - DNA, 224 bp, Cronobacter dublinensis
agggctggatcgcgggcgaggaatttacgctggcggatattttcatgacgcacaccctgctgtgggcgaagctctgcggtatcgcgctcggtgagcagcgtgaagattatctcaaccgcgcgtttgcccgccccgcgttcctgcgcgcgcaacagcgtaacaaccagtaatgttgtcccgacgcgccagctcaccggcgcgtctggctcttcaaaaacaccgcg

SEQ ID NO: 1200 - DNA, 447 bp, Cronobacter dublinensis
actacgtcaaatacgcaggatatctgtgctcactatcggcaacgcgacaggaagtcttatgcattcccttaattaaatttttttcatcaacggcgggacaggattaacgagacggatttatcgagtgagatcaacaggaagggaatattacgcagagcggaataagctaatagcgcgcgcgcgcatatacccgacatcgtggcagcccataagcagaatatcagacaacaagcgcctttttcctgttaccgctatcttaccggtctaaccttaaggcaaacttaaggcatcagttaaatcttaaggcgtaatgtgatacaggtaacgttccgtcataaaatttgccggaaatgcgcacaggaacggatcaggattcagtgaacgcgagccttgatttaacgcgctcaagtgcctgcagataatcaatgttttcaattaactggtgga

SEQ ID NO: 1201 - DNA, 142 bp, Cronobacter dublinensis
acaggttttaagacgcgcgcaggcctcctgcgtggttaatcctctcgcgtcgctctgcagccgtgctaatgtctgttccgcacattctgctgacgccgtttcgatgcagaaaacgtccgctttatttttcgcggccaggtta

SEQ ID NO: 1202 - DNA, 108 bp, Cronobacter dublinensis
accataatttcaaaggcgcacgccatttcacctttaaaaagaaaaaggcgtacttaaacggggttaattaaaagaaaggaattaccgtaaaggcggagggaacagagc

SEQ ID NO: 1203 - DNA, 146 bp, Cronobacter dublinensis
gcctcggccacccgcattaaaaaacggtgcttaagacgtgccagaataaaggcccgggcgcggtaatcgctggcgggataatgtcatcaatccacgcgacgttaatagctaaaaacggctttcgtcagcggcgaaagccgttattg

SEQ ID NO: 1204 - DNA, 240 bp, Cronobacter dublinensis
ggtggcgcattacccgtgaacgccgtattgcggtatgatgaagactccattcaccgccggagggtgtatgcattatctgctcgaattgatttccaatctgctgatctactggccattcagccgcacgcccgctcaggaaaagaacgccgtgaccgggctgaaataccagccgctgtttacggtgccctcggacgatccgcgcatcaagaagaccaaagacaccccggcggagtaatcgct

SEQ ID NO: 1205 - DNA, 108 bp, Cronobacter dublinensis
attttcttcctcctgcacatcctgtgcggtggcgagcgcgcgcaccggcagcgcggcggcctctctgaccgccgacagcacgccgcgcgccgtgcgcggtatcgccgt

SEQ ID NO: 1206 - DNA, 467 bp, Cronobacter dublinensis
gctgacaggcacgttagccgcctcactcactacagtggttatcactgcctgtagtggatgttactcactccagtggttattgttaagcactgactcaccacagtggatagatcctttacagacattacgaggatctttgcgcacatccggtttgctctggcgatttcaacgtgaaatccttttgtttagtgctgataatacagccagttagccgtgaaacagtctggcgagacggcgttatctttaagcgtaactacatcccatacctgcgtatttcgccctgccgggcactgaatgatgccctttaaataacgctattccctttagcatcgcgaagcgcattaaatgtccatttcgctatttaaccgtttattaaccccaacctgccctattttatcccggtccgtattcgcaatttgcacaggggattgagattctctttcccttaataaaactccctcacgccg

SEQ ID NO: 1207 - DNA, 499 bp, Cronobacter dublinensis
catcaccaacggcgggctgttacagagccagcacgcgctggaggtggcggccgggcagcttgataacctttccggcggcacgctgtacggcgcggacggcctgcgtctgacaatccccacgctcagtaaccaggggctcatcaccaccaacggcgatctgacgctgcacgggcaggatctggtcaatggcggtgaaatcaacggggtaaatgtccggggcgacttcgccacgctcgataaccgtggccgcctgctggcggacaacgccatgacgctcagtgccgccacgctcaacaacgacggtacgctggctgcccgccagctgacgctcaccgccgatcgcctgcacaacctggggctggcgcagggggataacgcgctgaacgtcacggccggtgacacggagaaccagggcgcgctgcgcacgggcggcacgcttgatttacagggcgagacgctgaccaaccgcggtgagctcagcgccaccgcgctgctgctc

SEQ ID NO: 1208 - DNA, 142 bp, Cronobacter dublinensis
gaccaaacaggatctgaaagagaagggcaccagccagagccagagtcagagcaccgtcggcagcaatggccgcgatgtaaccatcagcgcaggtcatcagctgcacgtcggcggttcggatcttatcgctaaaaaagatctt

SEQ ID NO: 1209 - DNA, 126 bp, Cronobacter dublinensis
ggcggaaaacacggcggcgggggttatggcccacgcggtggtcaacgccgtgctggcgaaggtacaggggcagaacgcgctggccggcgcctctggcgcggccgtcggcgaagcgatggggtacct

SEQ ID NO: 1210 - DNA, 437 bp, Cronobacter dublinensis
cgcagtagcattaaaaggcatgttattcaggataaactttatatgcggccatgattctgaatgtatcagtctatacgtgattaaccagcaacgaactctaaggcatgctgtccagtacgcttcagaaggtagtagtcaggtgagcgagataagcggcggtagccatagtcgcagctgaatacacaatatgaatcctgatttccttacggaataaataaacttcatcagaagtatatttgtgaccctcggcattcagtattttaattgttgcgatagctctcagcagggtatacaaagagataataaccgcaaaggctacgccaccccatattacataaaccaccccctcaaaggggttatcgaatggaatcttttgcatattattcatattattaccttcgcttaattatggtatgaaatttcatgcaacagcgccc

SEQ ID NO: 1211 - DNA, 424 bp, Cronobacter dublinensis
gacagggataataatccctgcaacttttagacccgtgacgggtaatgatttccgtgggtgataatttatgtcttaaggaattaaccaagatgtctcatatacgaaagtcaccggtacagttcgacaggatagaagacttaatcactgagcttgaaaatagcggccactcaaaagcctcactctggtattcgggggctttaaccaacggtacgcctgacaaacgatatccggttgcgattatttcagcggactgcaggatgattgcgcaaaaacgctctgacggtacatgggttgcgctttatgggtacgatgatcctgtgagctctaccggttccgtccctgctaatgcgtttaacttggaggagaactggtttcagctgctcacagtgcagttacttctggggcgtaagacgggtaaataatc

SEQ ID NO: 1212 - DNA, 540 bp, Cronobacter dublinensis
cgaatcctgcgctgaagtcgcaatggataatggatacgtaaaccaccacgggattagcgttccagaaataactgctccaaatctcagttattctgcagtcactggtgactggcgggttttgccggcgaagctgatgtaccgcatcagggagttgccggtgattcaaggagaggccgatcgcgttatcactgctgctgctgatgatgcttgccctcctgattatgacgaactctttgaggctcggcagtatcagtatactcgccttggcctcaaagccatcattcagtcgcgtcgtttacgacagttcgcaggcttacctgatactcgtctcaatgcttctccctggtcggctcagaacgtgctctggaaagagtggcggcttgaaagaaaacgtcttcatgatcgcgccgtactgaatgccagagctttagcttccttcaatatgcagatacgtaataaagtcgcagatgctccccaaaaccgctcagatggcggaattaaatttccgtgagccgccgagtccaggccggtggcttgtat

SEQ ID NO: 1213 - DNA, 107 bp, Cronobacter dublinensis
cgaatcctgcgctgaagtcgcaatggataatggatacgtaaaccaccacgggattagcgttccagaaataactgctccaaatctctgaaactaggcagggtccccac

SEQ ID NO: 1214 - DNA, 138 bp, Cronobacter sakazakii
  ST4 strain
catggcgcgcaggcctcatccgtggcagttgagcagatgagcaaggcgaaagctgccggtaagaagaagctcacccgcagcgcggctttgccccaattcaatgcgacaaaggcccgcgagttcatccagctggtcgca

SEQ ID NO: 1215 - DNA, 191 bp, Cronobacter sakazakii
  ST4 strain
gtgatgacgtggactcccgtcaatggcgcacaaaatatgcccgtaggaaagtggctggttcaactttccgatggggattttgcagtggcaaaaattcacgaagaagtccaggtagtgggagggcatttccattttgatgcgccgcctgtagtggcttacatgccgcttccagtaccgtatgcaggagtgaa

SEQ ID NO: 1216 - DNA, 158 bp, Cronobacter sakazakii
  ST4 strain
cttattaagttgcagcaagagcttaataaggaagttcaggaagggcagcgctggtatgaaagcgatgctgtttttcagcaaagaagaggacaggctgcctttgagcttaagcgcacagagcaggaaatagccagcattcgtgccaaggctgcaaatga

SEQ ID NO: 1217 - DNA, 100 bp, Cronobacter sakazakii
  ST4 strain
taagtatgagcaggaacgcattgctgctcagtgggaaatatggcgaaaccagaacgcaggaaacgaagcacttgctgcctcattcgatgcacttgctggt

SEQ ID NO: 1218 - DNA, 197 bp, Cronobacter sakazakii
  ST4 strain
gttaaataccaactatctaccgtaggaatccagtccttaaaaacactcattccacttctaagaaaatcaggccagaatatctgactgttaactatgtcagagtcataaggcatatattttctagttatcaatattgatattaatatgcatgctatggtgatcgcataccgcgacgtcctagattttataatggtttc

SEQ ID NO: 1219 - DNA, 251 bp, Cronobacter sakazakii
  ST4 strain
tatctttggcatgctgctgaacaaggatgccaatatgcaactcaacttgcagaaagttggtttgctgctgctgaaaaaagaggtgagtattcagacgaagctgacaaaggttgcgctgtactttgggggtacgtcaaggcacctgatgaagaggttttaaacctagaaagtcccgagtttagagtaactttaagaagagcgctcgatggtctttggccaactataaatgcccaggatgttgatgagagaga

SEQ ID NO: 1220 - DNA, 129 bp, Cronobacter sakazakii
  ST4 strain
ctatgaaccgtagaatgaaggctgcattggacgcggcgttacaagacatcttgtctttaacacctgaagagttccttaaagaagctagggaatctagagaaggggatgttttctcttttttgaaaaaaa

SEQ ID NO: 1221 - DNA, 106 bp, Cronobacter sakazakii
  ST4 strain
ccactgcttctgcctcttcttgagattccttctttcagcatcgtcaaaaaataatggcccacacacgggccatttttgttaaaattcaactcgttaatacattccg

SEQ ID NO: 1222 - DNA, 131 bp, Cronobacter sakazakii
  ST4 strain
ggatcgaatgctacgagcctgtgaggtgcaaagcagtaagggagcagaggccgctttgagtcagctttcagaggctcaggccgctctggccgctcttcgcgccgctgtagctgaagcacaggtcagtaaac

SEQ ID NO: 1223 - DNA, 134 bp, Cronobacter sakazakii
  ST4 strain
caaaaaaagccagataccaagcatccgcgtaatacgccaatttttgcagcttcaaattggacatagtttcgcctgaagctgagatttttgtgatgatgtaatcacatagttgattgatatttatcattatttat

SEQ ID NO: 1224 - DNA, 217 bp, Cronobacter sakazakii
  ST4 strain
aaattcctatctgaaagaacgatacaatcaagccaacaagcgcaatgaaaggtacgaatgcttcacccttgtcattttggtataaggtggctaaacctgcgaaaagaacgccctgaaaaatcatgaaaaaattattacgttgagataactgagttatctcaaagtctcttatgcgaatagtcagctcatagaggcgctttacggccctaagatcacc

SEQ ID NO: 1225 - DNA, 837 bp, Cronobacter sakazakii
  ST4 strain
aaggtagttttgttacttcaattttttctggatcagtttcctgcatgtcttttttttcattatatgccatttgcaaacaatgtatagtttggcatccattaacaacctgagggttatctaaagtatattcattactgcctagtgcatttatactatcacatataatggttaatccattattcattgcccaaaatatttgagatttagagtcacttttagctgtttcgataattgacttgtttacaactttatcttcgccaagaaaataccttacattgccctcggttagctcatcacggaatctgttagttttatccataaatgattcaattaatttgtttccagttacaaatcctgcatagccatcagtatcgatatctcgttctttaagctcaagtggttgggagacaaaggagatttctatgcttttttttgcgttttccgtaagatcaaatatatcttgcgcaccccagaaaaaaaattcaaaaggtatctttaaagggtttttgattaattcttgttttaggtgatcaatttttgttgatacttttttgtcaattgcgactgttgcgtagaatacttcgcatttaaaggttgctctttttcttattgcctttctgaaaatatttctgatgagctttgctgtttcaatgaaaagatcgttggcaccaattttttttaatagcttttcatctagttcaagattgaatatttgatcaatcccttcttttgtttttcggaagccatctgtttctataccagtgacttttttggtttggaagaatttgacaacgactcgactatcttctttgatggggtgttcttcatccttaacta

SEQ ID NO: 1226 - DNA, 167 bp, Cronobacter sakazakii
  ST4 strain
ctggtttttcagaacttcagaaataccgaaagggatgcgccttgatgtaaatgacaaaggtgaacccgttctgttagaaattaaaaatgaaatgacagaaaaaggtgaagttgacgccatctgattgatacaaaacctcggtttaggggaaggctccgcgcttccag

SEQ ID NO: 1227 - DNA, 813 bp, Cronobacter sakazakii
  ST4 strain
ctaagaccataggcgtagtttgtttactacgccaaaagtcttcttctgaaacccctttcatcagcaatctccatcaatcttgcctctgctgcagcctgactacgcattcctgaaagcgtcattctaaagtcatgagcatttccctgaatgttcaatggcaggggaatcgatgcgatcaaagtgtcctcaagttcccatggcgcttcgacaggtatccagtgaactttggcattcttttccatccaggcatcaagccactgctcgcctgggtgagtgaatgtcattctggagccagacccaacccggcgcaggggaaagttgctttcacggctgagtagcactccaagcgtgcgtctaagagtggaaccagcagcatttccgctgtaatgcgttttgatacgcttccttaaattcgaacggctgttgggtttcccgcgctggtctggtgagatgccaacatacagcaaagtgtaatcgtcgaatgttatgcagccttctgcaggaacgcccggagggatttctttaaaccaccaaaaataaataccgttcaccgctggaaccggagaaggcacactcatgacttccgttctgctgtaggttttctcagggtaaaaatcgaacattcggctttccttgctgactattttttttgattttattcatttgttgccatgaatcgatggtttttagtagtgaggagggcgaaaaatcagggggaattgaagtcaggtttttgcgacgtgctttagcgctgtcgccactttgtcgccatgcataggaaagtggtgatgtaagtaattgattttacggttg

SEQ ID NO: 1228 - DNA, 189 bp, Cronobacter sakazakii
  ST4 strain
tataaattacatatatatttgcattaacaggaaatatcacgcactttgctgttctggatccaaaaactccatttttcggatctggagttaaacaacacgagaacaatccagcagcaacgagagcaggctggccatccttggcgtttgcactctttatcgaggcggaacgccgcgatctggcgaccctgt

SEQ ID NO: 1229 - DNA, 620 bp, Cronobacter sakazakii
  ST4 strain
cgttgtgaaagatgtcaaaatcccatgaatattaaagtgagaatacaatgaaccctctgagaaacgaagatttacattatattgattttattaagctacaatacgagcgtatcgcccatcacgagaaccagaggctcaccttcagctctctggtaatggctttaactaccgcacttctacctgctttgtttattattgataataatcccggcactgtgttaattatttatgtttgcgcgttattaattgttattaattgggttgcgataaggttcgtgtcgaaatccagagaatgggtgaaattacatcagggcagggcacgttacattcttaataaatataaccctgacctcgccaggaatgtctataacgatgagggggccgcacagtcatcagcttcagcagagcaactccctcctttaaaaagagatagcgataaagatacatcgagacgaccaagtttacagatctatttgcatgcatttcttataggagctattgtgatttttttgttaattaggcttagctgacagcgcaagaatcccattaatgtcggtgaaataatccacttcttcgtaagtttttgttgcccgcagtccgcttacttaaggtaaacgttg

SEQ ID NO: 1230 - DNA, 171 bp, Cronobacter sakazakii
  ST4 strain
ccacctgctatgcaggtggtttttacgacagaaggaaatgtttattatatcgagtattactgcttcccatactcctttaaatcaacttttagtagttgtccattcatattgcgtgtttgtttatctgaaggaaaagagatgaaaaacataattgagataaaagcaatcagg

SEQ ID NO: 1231 - DNA, 205 bp, Cronobacter sakazakii
  ST4 strain
atccatatgcttcaatttatgcattgtgccatattctagccattctataaaaatctttaagcctttagccattgccactaaaactggcaatgctcctgtcgcaattttccacatgctttcattggttattgtgtttatatccatgcgcgtactcagaatgatatggtttattaaaatttggtctattatgtggatttttttgagc

SEQ ID NO: 1232 - DNA, 225 bp, Cronobacter sakazakii
  ST4 strain
ggcaagaataatggcgatactgaagataacagccagcgccgttcccgcccgcaaactgctggtgcaggatctgattaaacgccagatgctgagaatgctatttgagttttccctgcccggtgccaattattacctggtgacgatgaaagagacgcggaacggcccgacgtgcccacctttcgcgagtggagagtaaaagcgatgcgggcagaaagcgggccgcac

SEQ ID NO: 1233 - DNA, 121 bp, Cronobacter sakazakii
  ST4 strain
ttacccgccctacaaggcgttaaggttcactctggcgggtgcgctccgcttacccagcctacaaggcgttaaggttgactgatggcgggtgtgctacgcttacccgccctacgtccgatgg

SEQ ID NO: 1234 - DNA, 1272 bp, Cronobacter sakazakii
  ST4 strain
tgcggacattatatcatttttaattttatataatccgaaataaaagcattttgcttctttacttcccgcatgaaaagtaaactctttgccatgaacaaatatgctccaacgcattacctcagaatttcattttaacaaataagcactcattaaactcatggaaaaggtagttataaaaccaaagggatattttaaatgtcacgaaatcattattcatcgccacgggtatttcgcctgaacggtacggtgggagtctgcggcacaaacaactccaatgaagtgaaaaccatacagaccatgatcggtgacgctggttataaaacgataacgggtcgaacggtgctccccactggcatatgtaatagtgataccatcgaagctattcgttggtatcaacgtctcttaaatctgtcaccaacaggattgatacatcctgtagatcactggattatggaggcattagccacttcaggcggcattttctggcggccacagcatgttggcggttcgctcaaagtcaggcaagggcagttcacgttcgataacgaaggtattgattacattacggcggttgaaccttttcgccagccacagcgtataccctctttctcgcgtattctacactggcccggaacctatgcatcgggcgttacgctgggacgaggatatgatatgggtaaccgaagcgcaggacaaattctgtttcacctgcgacaggcgggtattgaagaatataaagctcagatttgtgcaagagcgtctgggttgaaaggcagagccgcagcccgtttcgtgcaagattatggtcgtcttacaggagaaattacccatttacagcaaataaaattattcgagatcgtttacccggactatgttaacttagcaaagaattattatataaaatacacccagagaaaagttgttataagcgatgccccggcatggtcagcaatcaatgaaaggataaaggatgtgtatgtggatattatttttcagggcgtggatgatataaaaaccctggttgcctgcgtggcaaagaatgataacaagcaacttattatgttaatccgtaaaacgagatcgtatatgggttatgaaaataatcgtcatcgtatcggatatttacaatgaaaattaaatattacttcttcggattattttttctttacgcccctacgcaggccgttcccttttttaatggcaatgagatccctcagtgtcttgcactgccgcatgttcgagatgcagaggctgcgcagcagaaatgcaaag

SEQ ID NO: 1235 - DNA, 977 bp, Cronobacter sakazakii
  ST4 strain
cggcgctcgatgaaatcggtggcgggagacgggaagcccataatcagatccccccgttcgggttgtacatcgctagggtgcgattttcgccttcctcggtcgatatgtctttaaacgtcgtcaggcaggcatccatccattcgttcgcctgttttagcgaccagttccagttaacagcagccagctctttcacaaagtcggcagttgtgacaacgcggcggcctctggcgtcgatcttcatagcccggcgaaaagcagtttctatttcgtaatagcgcggcataatttcctccccataaaaaatactgtatatggatacagtagtttcatgcggaaattagatcaagccagcagagcctatcaatcgcagcggcagaatatattttcatgatcgatcacggttacagcgcggcctcggcgggccgctactggatcatgattcatcgttgctggcttcgccttccgtattactgctggtggcgctcccggcagccatcagactggtaaccgcgcttttcagttcggccagttcagatttacaggcatcaagctcggccttaacttctttgaaagcctcaacatacaatgctgacagcgcgttatagtcgagcgcaagcgggctctcaatcgttcggcattccttgtcaatggtcgtcttgtcagccaagcattccgtcacggcctccggcagtaccttttgtacatcctgcgctataaggccggcgttccgtgaagtgttctgagtggtcgtgtgcatcgagtacgtcacgccacgaagctggcaaattttatctaaggcgctttccactggcttgatccagaacttcgcgcgctcgtcggaggtggctgtgaacttaacggcccggatctcaccagtcgccccgttaactgacatttccgagcccgtggcacctgtagagctattgtccggcctgatgcatattaattgtccgtttgcgataggcctggaataaata

SEQ ID NO: 1236 - DNA, 265 bp, Cronobacter sakazakii
  ST4 strain
ttttttcagcacttttgttgtgtcgaacgaatcagcaagctcttgcgcccgatccgcctgctgttgagcctgagaagccgacttattcgcagacgctgccgaattagccgcgccgctggcactggtggccgcagcggtggcgctttgggtagcgctggccccggccttctctgccgcctgctgcgctgctgcggcgctgttcgctgccgtctgggcatcatcacgcgcagattctgctgccgttttgtcagcgcttacgcttttc

SEQ ID NO: 1237 - DNA, 160 bp, Cronobacter sakazakii
  ST4 strain
tgctaaggctcttactaccttgccgtcatactccaccacgacaccggacgcactccactttgcgaacaccatataagattgccgcgtatagctggtcgatggcggagaccaggagccagtaaatgtcacccgaccacgatacacgcactgccccacggtg

SEQ ID NO: 1238 - DNA, 127 bp, Cronobacter sakazakii
  ST4 strain
catgcggggcaaataacgcggttgcgccgctcacataccccggaatggtgtatttaaaaccatgcccggacgtgtaaccacaataagatgggcagcgaagccccgctgtgatttgcatcgccgggcc

SEQ ID NO: 1239 - DNA, 141 bp, Cronobacter sakazakii
  ST4 strain
ggcgcccgtcatggaaaaacgcccttctgtggcgacgatggttccgcgcaccgtcacgttgttaaattcagcggcgcccgacttgttaatcgtccagccggttttaccggccacatagtcattcgactggataaacgcgcc

SEQ ID NO: 1240 - DNA, 719 bp, Cronobacter sakazakii
  ST4 strain
atggtcattacgtttcgggaaagcggcgcggaacggattgattcaggatcgacgcgccagaggctcgtttcaccgttcggcgccgtccagatgaaggatttcgcgacgtgacgccgcacaaaggccagcacggccagcatctcactgttcgcgccgctcatctcgaccggccagctctgaaactccgggttgatgccgtcggcggccacctgttcgtaaccatcgccaaactttgcgcggcgaacggtggttgtgtattcgccctgcatccccgcctggatctgcgtcggccagctaaaggtttcgattgccatccggtttcctccgggcaataaaaaacccgccacggtgggcgggtctgatggtcaataatgtatttcagggtttcgcaacgccccatacgtgctgtagcgccgttagctcgctttccagcgcggcatcaaaccgttcagcgcaaagttgcggcatcccggcgcgaagctggttaatttcctgctcgttgcttgccataatcacgcttgcctgctggcgaggcatccgggcaacataggacgcggccaaagccttaacggcggcgcggttcagttcagcggcttccccttcgccgatcacgaagtcagccccgaccggctcgcgctccggcgctgccacacttgcaggctcaaccgcacttccacagtgtttacatttgcgggcttctgggctgattggctcggcac

SEQ ID NO: 1241 - DNA, 1051 bp, Cronobacter sakazakii
  ST4 strain
cctctacgccgtgtagcttcatcagccagggcaggacgttgtaatcaaggccggttgcgccgcttgccccggcccgccactgtgtggcgcacgcctggaaaatacagaacgcatcccagcagtcgggccacacctcgatcacttcgtcgtcgaagtcgtccgccgtcaggccaaaggcggccagctcatcggcggtagggtcaggcgtatagaacgcagaggcagcccggattagtttttttcgcgattgcccagcagttcgcgatagtaggtttctgtgatggctttcagcgcgccgggatagttattcagaagggtttccagattttcgcggctgaattcgtcaggaagcgcccaggctgcggcaatgtcagccacaaaatcgatggcggtcttttcatcgagcttttccatctgcgcaagctgatcgagcgggtagtgcttaaacgtgaaggtcagtacaccatcttcttcaccagcgcgcgggatcttcacgtcggctttgaaagtcgggttcgggtgcaatgcaaatttagtcgtcatgttcggttccttagcgccccgttgcggggcgcattgttattaagctgcggtgatcgtgacttcacaggtggcagtgaagccgccatcggtagtggttgcggtaatcgttgcggttgcatccgctgcggcatctgctgcggcggttacgttgccgctgccatcaacactggcgacggcttcatcgctggatgaccattcgacgcttttattcgtcgcgttgtccggcgttacgttcgccttaagttgcgccttaccgcccggtgccagcgacagcgttttgttatccaacgtaacgccagttactgccaccgggtcaggctttgggttgctggcgtcctgatccttgtaaaacgccatatccatcgacttaacggcaaacgaaacctgcaccgtctcaacggtgttaacggcggtctgcggctgcgggtcgaacgacggggtgccgctccagtaacgggtttcggtggctttcggcacatacattttcagcggcagcgtgtcgccgcgg

SEQ ID NO: 1242 - DNA, 3556 bp, Cronobacter sakazakii
  ST4 strain
gagccgatgccgttccctttcgggaaaaagttttcatcagaggaatcgatgatgccgatcgtcacgtcattatccgtaacgtcagagacgcgcgcggccaggtagttaatcagcggccagccggacgtgattagcacctcgtcgccggttttcaggccgtggccttctgcgcaggtaaaaaccgcgcctttggcgttagaaacggcggtaacttcgatttcatcgccgaactcagagccaacctgaatggttgagccgttaggaagttgaaagcccattctggcctccttgtgaaagatggaaataaaaaacccggcgggtgccgggttagctggaaatgtcagcgcggtaaggaatgcttaccgggattgagtagcgggtgtttcgtggattcagcacgcccgcgtaaatggagggcggggagcttatccagcaggcgaagccgtcgccctgcacgctctgcccctccgggaacaggacggcaacctggcgcgccagcgcgcgaccggcactcgttccgctgccgaccggcacaacaacgttcacctgaaaaatgccggggtaaacgtggcatgtcaggccgagatcgagcgtctgcggcgtggcgggcatgtcgaacgattccaggaaaatgcctgcgggcttgtcgccggggcagttctcgatgaaaagcgggattttctggccgtcggcccatgcccccagccgggcattcatggccgcgccgatatcggggatcacgtctgcacctccagcacagcggcattaaagaaacgctgaaactcggcggcggtgatgcgcaccatgcccgggggagcctgctgtgaatggcccatttccagcgcgtaggcgtagggcaggttgttggtaaagtaaaccgacgtcatgcccaccttaaactgctcaatcaccagcgagccgcgggctatcgtttcggtgcctgtcttatcgaccgttgcaagcgtgccgtccggcgcgttgttaaagcccaccagccagttaccgcgaaagcgcccggtatcaacgggtgacatctgcaccaggcgcgccagaatgcgcaggctggccgcgcgcactactgtctcctggttggctttagccctgtccacaaaggcgtttatggaggccataaaggcggtgttttcgctcatgtcatgccctcagttgcgcgcggtagcagataaggagatcggcaggctttaccgggttcgggttaacgatgcggtattgcgtgctgtcgatatccaccagatcgcccaccagcagctcctgatcggcggtaaagacgatccgcacgtcgccaccgatgattagcgtgccatccacctctgcgggcttgtaatcactgcgaacgccgacggcatcaaagcgggtttctggccggatgtgctccatcccggcgatcacttcaaccccgccaggccgggtgatcttccaggtagtgccgttgccgctcagtaactttttagccgtcgccctcattcgcggataactgatcggcatggctcaatccctcatcacgcgaaagttaacggacgatgccccggcgcccagcagatcccccagcagcgggcgcagccaggagaaataaaccccggctcccaacgtctgctcgctgtatttgatggaaaccgcgccgctcaccgcttcttccagcgcctgcgcgccgccaaagcccggcatcaggtcgatttcctgcgccgaaacagcaagccggtattgcgcctgaataagcgcctgcgggatttgatcgtcggggaaaggctcaccccctatcgttacgcctgcacgcggccacggcagcggctggcccgctttcgctggctttcctgcccacggctggatgttcagatagtcgagcgcctgaaacagcagcatttccgccgattcctccggcacgtcataaccacgggaagaagcaaaagccagcaggcccgccacgtcgccatagctgttaaacgttggggaagtcgggtcgttatcgatcatggggatctccatgaaaaaaggggccgaagccccttaagcgttactctggtgctgaaaccgtaactgcgtgcgcctcgctggataccttgctgccgtcgctgttctgcgcggtacagacagcggcggcggtgccagcggccacaccctccattaccccggttttcgggtcgatggtcgcgacagcttcatcgtcaacagaccatgcgagggtgtagctttcggcgtcggcaggctcaacggcagcggttaacgtgatggtttcccccaccttcacgccatccgggccgctcacagttacggacgttacttttttgcttcggctttcttaccgaaggtcaccagcacgccagcggtgtctttgtcgctggtgcgcactttcttccagtttttggaggtggtcagttgcgcatcggtcggtgacttaatagtggcgtcagcccactgataacccttgaggccgacggtgtagtcgtattcgccctgcatcagtgctttcaggttctctttgcccagtaccggctgcgccagcatgctaagcggcgaagtctgcaccgcagcagcgccagcggtcaggccgagaacgtgctgaaggtcgccttctgccagtgccgggatatcggagataacgaagcggcggcccagcccgtcctgcatgatgttcacgttgccgatctggaacaggcggctggcgttggtcagagactcgtcgatgaaatcgttgtaggtcgccccatccatcacccacgccaccagacgcgagaacgcatcccccatcgggcgcgcgcctttgttcaggcccgccagtgatggcttcacgccctcagcgctggaaaggtcagtgatcatgccggtgttgcctttgatggccgccagcagcgcgccgcaggtggagttaaggtaatcctggaggatcgccgcggtagcctgcgcagccaccacggcagacgcctcatccacgcttttgccgaggcgcttcatcatggttggcgtgatggaaaccgggccgatacggccatcaattttcaccatgcgatccagaatctggcccagctcatccggggtcaggtcgccatcctggtatgcatttcggcgctgcgccaggccgccgataagctgccaactggtgcgctcgatgtaatcaccgatgtgatcgccagatcccatgaccagcgcgccgccggaagcctcattgaatcgctgcacctgctgggccaccagctcggtggcggcggtagatacttgagcttcgaagatgtggagagtcattattcatttcccatatttttaataattttcgcggcctcgctcacaaggtcgttgccgcccagcccgtcagcgctgccgacagggttcgaagggtcaccagcgccgccggtgccgcttgcttttgatccgatgatcacgcccgcaaaggctttgttgctgctgaactccgcgcccagctcgtcaacggtcagcgccgacggcttaccgctggcatcaagcacacgggtaaccggcttaccgtcctgcatttccaccgccagacggcttttgatgtgcggcagcatgaccggcgcggcctcgc

SEQ ID NO: 1243 - DNA, 1109 bp, Cronobacter sakazakii
  ST4 strain
gcccctcaatagccatctggtaaccgtctccggcttcctggtacatggctttgtgttcgtccggcagcgcgtcaaaggcggctttatcaatcttgaatttgaacatcatcaactccgtcgagatggtcgcccggagacccgcaggaaagaaaaagggccgccactggcagcccctcgggattaatcgaaagcgcgcggctcaagccgtcgcagctggtcgagggtcagaaattccccccggtcgttaaaaaagtcgggcaccttgagtttcccggccctcagcaggtcggcgcgctctttgcccaggacggctttttgtcggtcgtaaggctggcgctgtagccattcggaataggtggtatcgcctggcgtctgcccgtccatgctggcacgggtgcctgcgtccagctcgtcggcgtcgatccccagctcccgccaggatttgaggatcagcgtctcggtagagcggcagcagaaatgcgccctgcccggcccgcgcaggtatggcacgttatggtcgatgggtttcccgtcgagcgtgtatttcagccggtcacggacaatgcagatcgttgtcgtgcgcgtgtcgagcgtcgaaagccactgtttgcccttcaccatgtcgctgttcgcgctggcgaacgactgccgggcggtgctggcaacgtgggctatggccgttcgggtcattgccgccaggttgcgccggttctcctgaatagccccgtcctcgcggttggccgctctggtgccgactacgcgccgggtgattgtctccgtggtttcgcccagcaggtaacccatgcgcaccgcgttggtgattttggtcagccggtcggcttccagtttcgcggcccattcggacagcagccgcccctgaaacggtctggaaacggcggcggcatacacctgatctggtgtgatggcctgtagttcgacgtggtttaacaccgcttccggcagtagctggttaaacaggtcaaactgatagcccgcctcatgctcagcaaacgccgccatctcgcttttcagcgcttcggtgacgggtttatatgccttctgattaagacggcgcacagaagccagaagggaggccagacggcgctcgc

SEQ ID NO: 1244 - DNA, 115 bp, Cronobacter sakazakii
  ST4 strain
acgtaattacctatcgtttaattttcaattaataaccaaccggaatttacagtttgaaaatgagtattccagatcagaatgacatattgcttgcctgcaaagaggtaaggaaaaa

SEQ ID NO: 1245 - DNA, 463 bp, Cronobacter sakazakii
  ST4 strain
tttcagtatgggcgtaaggtaaatggaaataggattgattctggcaactcagagtaaagttttctgtcacattaataaaattattaattccttcggcgcgcaaagagcctctgtaatacatgccgtctttccggctgtccgcataagccaccggcaaggattaggccgggagccaaccggcgcttatgctgcgggtgttattagccccaccgcccgctggggtaatcgcttttttaattggcgctttggctctggccctgcttttctgcaagacgctgttccaccagcgcatcaatctcggcctgtttctctgcggccttacgcttgaaatactcgcgaactgtcacccacccgccagcgataagcagcagcgttacgcctgcggcgctgtaagcagccagcatgaatgtcatgtccatttctttctcctgtaaaaaagccccgctattgcgaggctgtagct

SEQ ID NO: 1246 - DNA, 224 bp, Cronobacter sakazakii
  ST4 strain
ctgcttgtttccgctggcttgcctgcatttttttgttcgcatttttaaccgcgtttaattcacgattaacttcggttaaagatgcctgtgattttgtgaactggccgtgataatgatacgcagcgagggaggatatcaggccaagcaccagcatgctgatgttcagcttgctcatgacaggaataactcccgctccgcagcgcgccgacgtaccaggccgttca

SEQ ID NO: 1247 - DNA, 819 bp, Cronobacter sakazakii
  ST4 strain
ttaccgtcaaccggttgtgtccagccatagccgatagtccagatccctgccgggcagcgatacgctttgagctggcagctttcgaactctttaatcagcgccagccccttttcactggtctgcattgaaacctcccgcaacctttgaaaccttgccgcgtgcgcagagaatcgacacacacagcgacaggttaatcacgaactgcgccaggtctgtctgaccggcccccgtccagatgcggaacaccttccagccgcacgcgaggatcagtgagtaggccaccagcgagataaaccggctccgctcacgcttacgaacaaccagcaggcgcagcatcgttaccaggcagaccagcgcgttagcctgtaaaagcagaacatcgatgttcattcactgccctcccccttgcgggtacggtagcgggcgagaacgcgcagcaggacagtaacagagatggtggaggccaccagcgcgccaatggggcgcgatacgctaacggtaacgggcggcgtaagtttatgaagcgcggcattgattaaggcggtgatgatgtcagccgccgttcctgcgcagtacatcccgccaataaacgaaatgatcgcgaagataatttgcttccagggttcgtgttcatcggcggacagcacataaagcgcagcaccgcccagcgagcacagcatcaccgcaggcgtagcttccgggaagaacgtggcgatggtaatgccaaccgtaccggtagctacgcccgctgatacagtcaggggatcggtcataatggttattaacgtcatgcgccggacgtggcgcggatatgaaaaa

SEQ ID NO: 1248 - DNA, 349 bp, Cronobacter sakazakii
  ST4 strain
cacaccagcgtgcgcagacgtgccagcgttttggctgctatgcgtttccccaccagttgaacgctgaatgcctcccagccccagcgcacgatctctacctggtgggcgaagcgagtggcatcggcatagcaccacatcagccaggcggtttcgtgtggctccagcgccagcacggcgcgccgccagcttgcggtggcatactcgaccggcagcaccagcggaatatgcgagcctttggcgcgcgactgcacgccaggcacgggctcattccagacggctactagttcgcccgtctccgggtcggtcactttaagcggcttgcgcttgtagcggtcggtgatcagttggg

SEQ ID NO: 1249 - DNA, 553 bp, Cronobacter sakazakii
  ST4 strain
caccacgctggtttcggggttgtgattacagacgccgggaatgcgtacctggtgcgtaagtcagccacgatcacccccaaatccgttgttgatacgttctgctggggcgcggttcgtgacggctttccggcagctccacacgcacaatgaatttccggcagtcggcagagagaaaacgctcaaccttcacgccgcgcttgcggtactggttcatcagttcatcagcttctgcatgggtacaatctgtgtgctcaaaccatgttttgcgcatcggttaagcctcctgtttcgcacgcagttgcgcatattcgctgtcttcgggaatggtgagacggcagccgatgttcagcgcccagccctctacctgggtgagaaaaaagtgcatttcgccggtatcgagatcggaggtgtgccgcagggagcggatcgtggttttttcgccggtgatgacgtcggtcatttcgcgttcttcatggccgagataggaatgcttaagcgcgtctttaacccatgccggagaggcaaaggttttaccacgcttgatcaggtaagc

SEQ ID NO: 1250 - DNA, 105 bp, Cronobacter sakazakii
  ST4 strain
gcttgccagcagcggctctaattgcttgccgactgctgcaaaattggatttgtgcaaacgcacgccgtctttcgggaagctcacgccgcacccccaaagaggccg

SEQ ID NO: 1251 - DNA, 332 bp, Cronobacter sakazakii
  ST4 strain
gctagcgcgattattggatgatgaatgatgcaattcaatggttgtttaagcatcacttaacgatgcaatgacgctgctaaaatgcatgccatatacatctatcttaaattgactggcatcaaattaaggcctggttggaaaagtgcattatttgatctaaaagcaaaggcccgccgaattggtagatagcaaccagctcttcaataacggtatcaccatatactggcgtggccccaaactctaaatcaaaaaataagccgccatatcacgcgctcctggcgttaaaagccgatgaggcagggattgccccatatacgcaaagaacgcgcctc

SEQ ID NO: 1252 - DNA, 229 bp, Cronobacter sakazakii
  ST4 strain
ccagtgcgaatcctccgctgttcagcttctgccaggctgcgccgttgagattcgcaggaagcgcagcatgacgtgatttctcgacgcgtgctgcgcagatagtacgaaagccagatgaaggcattaggcgtggagttggacgcttcatctggacgcttggagttatcaacggcgtatttgtagaacgccaagaggagattaactatgagtcttgattgcgttcccctat

SEQ ID NO: 1253 - DNA, 547 bp, Cronobacter sakazakii
  ST4 strain
acttatggatattgaagttaggaattttggtactattgcggatgcacatgtacacataggtggcctaacagtgataaccggtgaaaacgacaccggtaaaagcactgttgggaaaatattattttcaattgttaaagcaatagctcgctatgaatttgatttagaggaggataaagatgcacgtttgctaagccttgctgaagctctttacttctcaataattagacgtgctattaacattgcgacaaacacgcaaattagagacttatttcatcctaaaaaatttatcaaccacattaaaattgatccaaattatgcattaaaagaaagatataatgcattaaatcgtctcttagatcatggtgacattgccgagattatgtattcaagcgcaagttctaagcttgaagaaattagacaactaattgaagagccagatgatcgtttttcggtaatgaacagagcgataggaaaggcatttttctctgaatttagaggtgaaatcgtcccgcgagggaacgagattcctttaaaaccagttgtaaag

SEQ ID NO: 1254 - DNA, 265 bp, Cronobacter sakazakii
  ST4 strain
aatgttgcctctggcgtgaaatcactaggtattttagacatgctactgaaaggtggccacgccgaaaataatcaattactcatactggatgagccagaagtcaatttgcatcctaaatggcagattctttattgtgaattaatttgtgatttagtctactctggtgttgatatcattatcactacacatagcccttatataattgacgcattaaaacattttgctgataagaaaagaattgaacatagcttctatttagcgacta

SEQ ID NO: 1255 - DNA, 572 bp, Cronobacter sakazakii
  ST4 strain
ataaagtttacaacttagcatcatgtcaccctgatgggaagaaagaaaagtctcccgactgcctttttttagttgatgacatcctttattttgtagaatttaaagaaggtaaacctaaaaaagatgatattagaatgaaaattcatgagggtattaccactttattttgcttcgctcttaaacacgtcccaactatcacccgtgatgatttctttagattagacattcgttatactgtaatcatgagagacttcagagccagaggtcgagaaggttttttgcaagatttagaggcaatttctaataaatttaatttaaaaaacttagaaggttttttagtcaaaaaagctcttgttaaagattccccgcaaagaatcttagagtttctgcatcaagtgagttcaggcagaatcaacagaattcagattaactcacccgacaacagtaaattaactgattacacgctataaatcttatgggctcaaataagatttcatatatgcacgtttcatgcacccaaacggcataaatttaaaaatagacttaaaaaacaataggttaaaatcatccat

SEQ ID NO: 1256 - DNA, 554 bp, Cronobacter sakazakii
  ST4 strain
ttttaatgcaggaaggctgacattagggttttttgaaaggcatagcattagcaaacttgctttatatcctagtttttttgatagctcattataaggtaatggagtgaacgtaaaactactaactcccaaagaataggctgtccgctcaacggtttcgcgggaaactggcgacgctgattcatcgatggttaaattaaacattctcgttatcctagtagcaatgctgtcctttgatactagcggaaagagaacgtttatggcaggttttaattataacaaaacattataaaaaactatgaaatgaatgaaaataccattcatttatcagcctccgtcagcaggaaaatgtccgctcctcgctcatagcggagattcagcccaactagcttgtctgcttcatactagaaacggacatttcaatgatttaagatttagcatatttagaatcatgtcacagacaaaatgacaaattaatattaggatgtttttcaactcaaaatggtgtttgtaattcaatgaagtatacttataatataacgtaagaaacaatattt

SEQ ID NO: 1257 - DNA, 1101 bp, Cronobacter sakazakii
  ST4 strain
gaagtatatttaggttgtatccattaaatgtatactaattaaatagttcctatgaaatttaatcacccaatttattatggtatttaatataaggatattttatgaaagaaaagcttttttttaacacgtccagaaaagccgcaaatagattaacagaaatttttgattttgcatggccaactaccatagctttgtggaatcttagatggcaagtcgaaggttatgttaaagttaagcctgatgtaaatcaatcagagttaacctcacgatttatttctggtagttcaattaccggaagtacagttagggccgacttgaaaaaagcatgtattgaaacatcttgggagaaacaacaaaatgaattttcaaagatattactaatagaattttgctccttatatgaaatttggtgtgaaggaataataacagaactaaaagcatctattgattcaaaatcattgcaattccccacactgcaaaaaagcactcaagggataatgtctgtattgtcaagcatgacccaacatcattccattatgatggaaaaagctttttactctttttatttgaccaacaagaaaaactcaaaaaatcacataaacaatctaatgaaatgttatagatatttcaaagagcttagaaattcattggttcactcaggaaatatatcaaaaaaatcctttaaagacgctgaggctaactattcttcactcactgctacaagtcttggggttcaagaattaccggaatataaacaaaactcagatgaagatagaataaatttatcattgcggggtgtaataggttttggcgaaatcgtattaaggatgatatcaacaattgatgcggaattggttaagacaaccatggcggaaaaatatttagcggaagagtggaagaaattttatggcgataaaccattgactctgtcgataacagaaaaaaagagaaatcaacaattggtgaaaagtttaaaaaaactaggtctgtcaacagtaccaagttcatcgtataatgatattgagttatttatgcgaagtgaaaaattaaaatgggcaaaatcggagtgggtaaatagtcacgtatgcctatgttttattg

SEQ ID NO: 1258 - DNA, 168 bp, Cronobacter sakazakii
  ST4 strain
attaattttttgaaatgggcaaaatcggagtgggtaaatagtcacgtatgcctatgttttatgttgggattcaagagtgatattaaattgatatcctacatattaaatatatatatccaccacttatctgtttatttaattcttatagccttactatttttgatgccg

SEQ ID NO: 1259 - DNA, 667 bp, Cronobacter sakazakii
  ST4 strain
aaatatttaaaactcaaattagatcctgctgccactttagggtaaatactatctccaataacattttgcattgtttgacaactccgaacaattctttctgctattgtatatacaccgaccaaagttggggaaacaaacaaaccaataatcagaatatttgaatttttataaagagtagaaaacagtctggcaaagaaaatgttttttccatatgacaattgttctttataagattcgacactaaaccgtaaactaaaagattctttcgtctttaatatcccataagcccacaacagcgttatcaacgcaccgattaggtaacaccattgaactaatattacatcacttttatcgcgaactaataaaaacaaaactaaagtagttaatactttaggtattgtgttagttatggtaataaaatgcattttttcaatgccttgaaaatgccactgaggaaacaatgaattaactattgctgttacatacgccagaataaaaagaaaacccaatcccttaaatgaattgaaagtttcaataatcactaaaaaaaacataaaaagtaaagttgccaatgttagttttattaaaatgacagagcttgtaattaaattcttttgattagtgtcattatttgcttttgctatagctctggtagctgtaaggctga

SEQ ID NO: 1260 - DNA, 1003 bp, Cronobacter sakazakii
  ST4 strain
accttgaaaatacgcataccccctttttgaaccccacccaagaaacggaaaaagggggaaaaaaaaaggggctttacgccccttgtatcaccacccgcctgtgcttctttggaggctggcaaggtggttatagatgcgtctgcaaatgtcattgcatccgagttgaaactttgtatcttcgttcagtaggtaaaggctattcataatcctccttaaaatggtagatcctcgcattcgtcgatggtttcattcgttggtacggttaaaataatctcacgtccaagatgtttggtcgctgtctgggaaataagttggtaggctgcttcctcatcgcccattgtctctgttagcgcccatttcaaagcggcatcaatgggatcgccattcggtttgcagatagctacaccgccccagggaagttctggcttgttctgctgagtggggatcgttggtgttggttgatactgtggagcatcccagacaaacggaagatcatcaaaatcaggaacagaatgttccgctgctgtcttatcaggattaggcgcggctgtgggtgcaggtggctctgccactacgtcagaaatcctaatgggcgctgctggtagttgatctgctgggataacgtgagcatcagtaagcggtaatgcagtgtactgaagggtgtcatacttgggatcgggattcggttctgttgtcaccagccccagctttttcaagtcgctaatccgtcttttcaccgtcgaaggtgatgttttgtgttttctcgctaacgtagcgtggctctcgtagcaattatcaccgttcgcttgataactcataaagcggcaatacagagcgacgtgatggctgtcgatttttatcccatcggggcagtcttttgaataaaggtattcaatgtcttcgaagaaggtgaagtcctttatgaaggtttgcgatgttacagtttttccgtcttcatcttgatacgtgtgctcgtgttttgcctgaatctgggcgagggttt

SEQ ID NO: 1261 - DNA, 496 bp, Cronobacter sakazakii
  ST4 strain
aacatatttaattatgtaacctcatgggacactttcattaacttcttgcgaatatcgactctttatggcagaaatgtaccaggtctctggagtgagatatcatcacatacagaatctaatggcccattatggacattgccctatgagcttgttatgtatgtcatacttggggcttcattgagcatgcataatagttggaagactcctgcatttctactgatcttatgtttttttgttaccactctttttagagggcaattaaattcagttggcgcatactatgcaacgtttagtaaattggctgaatttgggctatgtttttttactggatctttactcttcatgacaattactgcatggaatactttaaaaatccgagttaatttaattgcaatttcgttgatattaattaccacacttaggggtggtaacgatatgcttgcaataggtagtataatgatatcaatacttgtgataatgatatctctttctttta

SEQ ID NO: 1262 - DNA, 319 bp, Cronobacter sakazakii
  ST4 strain
caacgaatatttcagaaagagctattgccggtatcattgaaactgggattttcccaattccatccaaaattggaacatcatccatttttagtaattcagcatctcctgatgaaccaaatactaaaaatgcattattcctctcacttataccaggcagagctggaataagctctccttccggaactctcacgcactgaccaatagcagcggaggcggcatttcccgcttcagccgctgatgcagctgcgcttgttgctgactcactggctgatatagccagattgttaatcacaaactcagctgaaattgccgcttgcgc

SEQ ID NO: 1263 - DNA, 311 bp, Cronobacter sakazakii
  ST4 strain
ggcaggatttgtcaaaaataaatcctggtgatataaatgctcttaacgaagtacttaataacataacaattgatgattatgaaactattctagttggtaaaggtgcccttgatctaagcgatagttccaattataaaaaaatagtaggtgattttgatggtgtttcattccctaaaattttaaaccatcctgaacttggagttaaattacccaatatacttaatatcccaaatgaagtttctttgactttcatcaaagctcttagggatgttgtatctgactttcataataataaaacaaaccctttacta

SEQ ID NO: 1264 - DNA, 131 bp, Cronobacter sakazakii
  ST4 strain
gatattgatattctgaaagcggaaatgatgaaagatctacccatcgaaaacaatgatattttggggagattataaatgtttgtatgggaaaaggaagaaataaataaagatcaagaagatgcaatcaatgc

SEQ ID NO: 1265 - DNA, 114 bp, Cronobacter sakazakii
  ST4 strain
aagcgaaaaagaggcgtcaagatctgtcaagacaattgatgacgaaaatatttacccgttatttttattgtcttttttgatttgctcaggttgtatttactgcactcgcctgtt

SEQ ID NO: 1266 - DNA, 533 bp, Cronobacter sakazakii
  ST4 strain
ctaataaactctctcgcaatgatgcgcgaatgagtggcgaaaagtttatctctgcgtggctgacaaaagataacgaacaggagcagcttaaagctaatatgtatcttttgggtgtcatggatgcgacagaagggaaggcatggtgtagctatgacgttgcattgcccggctccttacgagagagtatttacagctatttcaaaaaattgccacaggaacgtaagagagaggccgcatcgaagttaatcatcgaggcgctggtacaggatttaccatgtaaaaaaggaaagcaatcatgaagccactttatgctcagttaaaaatgaagcattattctgctaacgaagagcgtcccggttacgtttcgcgtgacgatctttttaacgaaataggctacgatgctgctgtacttattaaatctaaccccggctatatgaatacctgtgcggttcgtatgagtcttgctctgataaaatgcaatgtcaattttgaagggcgactaactattatcaatggtccttataaaggcaaaa

SEQ ID NO: 1267 - DNA, 250 bp, Cronobacter sakazakii
  ST4 strain
ggcgtatacgttgatccttatggtaaaactcgtatttatccagagcatcaaaaaattttaataaaatatctggaaagtaaaaataaggacgatgatattgctgcttttgtagcgtttctattgagttctatttctcaagatgaggtaatcattgccgatggtgattaaaatcatcagcgactaaggtaatgagtttgtataagccacttcctgctgttttaattaaactgaattatttaaaagaataacg

SEQ ID NO: 1268 - DNA, 134 bp, Cronobacter sakazakii
  ST4 strain
tgttgacccattaagcctgcaggaatgctgttttaattaaactgaattatttaaaagaataacggatttttgagttctaagtataagccgcaaacgccgtaagattttttatgcaataagataaaaatataaag

SEQ ID NO: 1269 - DNA, 340 bp, Cronobacter sakazakii
  ST4 strain
gatttttttgattttttgaaaacactggatattgatgaagcattagatttgagagatgagccaaaatttgatagctgctggatggataatttcaatcttttaaaaggtgaaagctttgatgcatcggatattgcacagattgattccctgcgtgaaaaagcttttaaactatcgttcagagtaataaatgattctgaaattgcatcaagaatatcggatgatattgaactaattgcaaaaaatataataatcggaaaagaggacagttgggctgtttcaactttatgggcagcatataaaagtgggaaattccctgtttaaatttttttttttttttttt

SEQ ID NO: 1270 - DNA, 333 bp, Cronobacter sakazakii
  ST4 strain
taaaaatatcattttagttagtgttaactgtcattcagaagtaaaagtatcggtaaataaagatgatttcttgatagcaatggctgagcatgcaaaaaaattctttgaacacttgaaattaatccttccctcttcagataaatcatctgatctatcgatatcatatttaaatgatgttttaatgaggcatcattgatattaatatcgttaggaaaaggaaggtcttccttcctttgttacctattaaaaagcgaaaggatattaatcctaaatctcccatgcttaattttttatgattattttatacattatcgctaatttcccacatgatta

SEQ ID NO: 1271 - DNA, 497 bp, Cronobacter sakazakii
  ST4 strain
cgcacctgttccagcaggtgcgataaatgtcattaaataggtaagctatgagtaataataactttgattttaatgaagtgattattgatgtggtagaaaaaatcagactcgcagatgagttagatgaaactactattaatcgattatacgaatcacttgataaagttagtactgtttatgaaagtgaggagtttatcccaaaattgctggcgtatgatcttttagttcttcatgataatcttgagggagctttggagtgttattctggagaggatgaggtaaaaatttcaaaaattaactcaagaataaaagaatacatcgaaaagatatttctgaattgaatataaagagccggggcggatattaatccttcccgggttagaaagtatcgtcatttaataatctgaagggtaatatttggaaatacgaaaattgcatttttaggagactaatattaaagatatttataatgagcttgataaattaattagcgaaag

SEQ ID NO: 1272 - DNA, 188 bp, Cronobacter sakazakii
  ST4 strain
aattttaagaggtatgtgtatcggtttaatataatacctataactcttatataacagctttttattttattgatggtctatcataaagctatagatattattacgttaatttatgatgtttcaggagggtgtattattaatgttactaacactactcgatgttgaaaataaactacatatgagatttg

SEQ ID NO: 1273 - DNA, 228 bp, Cronobacter sakazakii
  ST4 strain
gacgtgcagcccaccttgatggtgttgtgacgggcttcgagtgacaatatttctttgattatgtataggtttttataaatgaaagaaatacaagatctggtgaaaaaattaagcgcatcgaaggaacatgaggttgtatggttagggcctacagatgaacaacaggttaaaaaattagaaaatgcgttaaaccttagtctgcctgaagattttaattttttcttaaca

SEQ ID NO: 1274 - DNA, 303 bp, Cronobacter sakazakii
  ST4 strain
gcagtctacctgaagatctagctgtaatatattttaaagatgatgaaatttgttggtgtttagattgctcagccgaaaattttggcaaggtagtgagttacgatttaatttcatgtaaaaatcactcaatacttcataactcttttaaagagtttctcacggaatatgtgactttaaggacctaatttcaaaatagcatattgttttttggatttaataattaaagctttttcaatttcggtggctgctaccaactatggtagacagctgctggtgacctgagcatacgcagctatttttggg

SEQ ID NO: 1275 - DNA, 113 bp, Cronobacter sakazakii
  ST4 strain
ttttatatatgaagatattaaaatgataaacagtctaatttttgtctgagtccagagcgagctattagttaaaaacggtcgtgcttgggttacaacctcttcagccgcctgcc

SEQ ID NO: 1276 - DNA, 204 bp, Cronobacter sakazakii
  ST4 strain
aatttcgtcagcatatgtcggaaacacggtacctaaccttttatacatattcattattattaaggtttgagtttcctgtggcacacctttctggctaagaaatagttgaaaattatcagctgcggctctgatctcataaataggcaagaattcccataaaacagggaattcattttcaatacgattcaggtaatcagctgacat

SEQ ID NO: 1277 - DNA, 145 bp, Cronobacter sakazakii
  ST4 strain
ggtttgtctttcaatacggtaaagcagggatgctgtgttgagataatgatagagccttcattagcttgctcgccagatttcatttgaatatcaaagtcggcgggcaagatgccgatcttgcgacgtaataatgtttcatttttat

SEQ ID NO: 1278 - DNA, 676 bp, Cronobacter sakazakii
  ST4 strain
ctatattcatcgctagttgcatgatatgcgtatagtggccgcccatcaggatttctcaaacctctccggttgagaaagttactcaaccaggcggtacagtgtaaccatgaaatgcattttgaaatatccaaagtaagctccttagagaccaatgaaactaaacctctcatttttttaaaaaattaaataaaactgaccagcttaattccaaggggattataatgcaaccaccaaacataatagggaggtaagggccaggcaatcatcgtttgcattttattaattctgcttcgttatagttagtagtgttaactaaatttgggaaaaaaagcgaaagattttttgattgttaaataaaataataaaaaataacttaaaaaaatgtgtcgtatcttccaaaaaaagatagactataaaaattaattattggtaatgaattcattaatttgcaataagtactataatatgttgcaatgacatacattttttgctgttttcatctttacgcgaatgtgtcaggagttacgcatgtaacttattgttagaatgggcaatattgtatgtcataatttctggagcaaatttcctgtattagtttttattacactatattatatttcttcacatagtcttcaataaggcaatgattatcccaagggcggtgacgatgtttgtc
